United States Patent Application Publication US 2024/0011007 A1 - sequence listing, part 2

SEQ ID NO: 17486 - RNA, 92 nt, synthetic construct
  source 1..92: mol_type = other RNA
cacagcaaagcctctttggaggctgaatggggtcccccgactctggctttcccccaggtatacatgttcctggtgaaatggcaggacctgtc

SEQ ID NO: 17487 - RNA, 92 nt, synthetic construct
  source 1..92: mol_type = other RNA
cacagcaaagcctctttggaggctgaatggggtcccccgactctggctttcccccaggtatacatgttcctggtgaaatggcaggacttatc

SEQ ID NO: 17488 - RNA, 92 nt, synthetic construct
  source 1..92: mol_type = other RNA
cacagcaaagcctctttggaggctgaatggggtcccccgactctggctttcccccaggtatacatgttcctggtgaaatggcaggacttgtc

SEQ ID NO: 17489 - RNA, 92 nt, synthetic construct
  source 1..92: mol_type = other RNA
cacagcaaagcctctttggaggctgaatggggtcccccgactctggctttcccccaggtttacatgttcctggtgaaatggcaggacctgtc

SEQ ID NO: 17490 - RNA, 92 nt, synthetic construct
  source 1..92: mol_type = other RNA
cacagcaaagcctctttggaggctgaatggggtcccccgactctggctttcccccaggtttacatgttcctggtgaaatggcaggatttgtc

SEQ ID NO: 17491 - RNA, 92 nt, synthetic construct
  source 1..92: mol_type = other RNA
cacagcaaagcctctttggaggctgaatggggtcccccgactctggctttcccccaggtttacatgttcctggtgaaatggcaggatttatc

SEQ ID NO: 17492 - RNA, 92 nt, synthetic construct
  source 1..92: mol_type = other RNA
cacagcaaagcctctttggaggctgaatggggtcccccgactctggctttcccccaggtttacatgttcctggtgaaatggcaggatctgtc

SEQ ID NO: 17493 - RNA, 92 nt, synthetic construct
  source 1..92: mol_type = other RNA
cacagcaaagcctctttggaggctgaatggggtcccccgactctggctttcccccaggtatacatgttcctggtgaaatggcaggatttatc

SEQ ID NO: 17494 - RNA, 93 nt, synthetic construct
  source 1..93: mol_type = other RNA
acacagcaaagcctctttggaggctgaatggggtcccccgactctggctttcccccaggtctacatgttcctggtgaaatggcaggatctgtc

SEQ ID NO: 17495 - RNA, 93 nt, synthetic construct
  source 1..93: mol_type = other RNA
acacagcaaagcctctttggaggctgaatggggtcccccgactctggctttcccccaggtctacatgttcctggtgaaatggcaggacttgtc

SEQ ID NO: 17496 - RNA, 93 nt, synthetic construct
  source 1..93: mol_type = other RNA
acacagcaaagcctctttggaggctgaatggggtcccccgactctggctttcccccaggtctacatgttcctggtgaaatggcaggacttatc

SEQ ID NO: 17497 - RNA, 93 nt, synthetic construct
  source 1..93: mol_type = other RNA
acacagcaaagcctctttggaggctgaatggggtcccccgactctggctttcccccaggtctacatgttcctggtgaaatggcaggacctgtc

SEQ ID NO: 17498 - RNA, 93 nt, synthetic construct
  source 1..93: mol_type = other RNA
acacagcaaagcctctttggaggctgaatggggtcccccgactctggctttcccccaggtatacatgttcctggtgaaatggcaggacttgtc

SEQ ID NO: 17499 - RNA, 93 nt, synthetic construct
  source 1..93: mol_type = other RNA
acacagcaaagcctctttggaggctgaatggggtcccccgactctggctttcccccaggtatacatgttcctggtgaaatggcaggatttatc

SEQ ID NO: 17500 - RNA, 93 nt, synthetic construct
  source 1..93: mol_type = other RNA
acacagcaaagcctctttggaggctgaatggggtcccccgactctggctttcccccaggtatacatgttcctggtgaaatggcaggatctgtc

SEQ ID NO: 17501 - RNA, 93 nt, synthetic construct
  source 1..93: mol_type = other RNA
acacagcaaagcctctttggaggctgaatggggtcccccgactctggctttcccccaggtatacatgttcctggtgaaatggcaggatttgtc

SEQ ID NO: 17502 - RNA, 93 nt, synthetic construct
  source 1..93: mol_type = other RNA
acacagcaaagcctctttggaggctgaatggggtcccccgactctggctttcccccaggtatacatgttcctggtgaaatggcaggacttatc

SEQ ID NO: 17503 - RNA, 93 nt, synthetic construct
  source 1..93: mol_type = other RNA
acacagcaaagcctctttggaggctgaatggggtcccccgactctggctttcccccaggtatacatgttcctggtgaaatggcaggacctgtc

SEQ ID NO: 17504 - RNA, 93 nt, synthetic construct
  source 1..93: mol_type = other RNA
acacagcaaagcctctttggaggctgaatggggtcccccgactctggctttcccccaggtctacatgttcctggtgaaatggcaggatttgtc

SEQ ID NO: 17505 - RNA, 93 nt, synthetic construct
  source 1..93: mol_type = other RNA
acacagcaaagcctctttggaggctgaatggggtcccccgactctggctttcccccaggtttacatgttcctggtgaaatggcaggacttatc

SEQ ID NO: 17506 - RNA, 93 nt, synthetic construct
  source 1..93: mol_type = other RNA
acacagcaaagcctctttggaggctgaatggggtcccccgactctggctttcccccaggtgtacatgttcctggtgaaatggcaggacttatc

SEQ ID NO: 17507 - RNA, 93 nt, synthetic construct
  source 1..93: mol_type = other RNA
acacagcaaagcctctttggaggctgaatggggtcccccgactctggctttcccccaggtgtacatgttcctggtgaaatggcaggacctgtc

SEQ ID NO: 17508 - RNA, 93 nt, synthetic construct
  source 1..93: mol_type = other RNA
acacagcaaagcctctttggaggctgaatggggtcccccgactctggctttcccccaggtttacatgttcctggtgaaatggcaggacttgtc

SEQ ID NO: 17509 - RNA, 93 nt, synthetic construct
  source 1..93: mol_type = other RNA
acacagcaaagcctctttggaggctgaatggggtcccccgactctggctttcccccaggtttacatgttcctggtgaaatggcaggatctgtc

SEQ ID NO: 17510 - RNA, 93 nt, synthetic construct
  source 1..93: mol_type = other RNA
acacagcaaagcctctttggaggctgaatggggtcccccgactctggctttcccccaggtttacatgttcctggtgaaatggcaggatttatc

SEQ ID NO: 17511 - RNA, 93 nt, synthetic construct
  source 1..93: mol_type = other RNA
acacagcaaagcctctttggaggctgaatggggtcccccgactctggctttcccccaggtgtacatgttcctggtgaaatggcaggacttgtc

SEQ ID NO: 17512 - RNA, 93 nt, synthetic construct
  source 1..93: mol_type = other RNA
acacagcaaagcctctttggaggctgaatggggtcccccgactctggctttcccccaggtttacatgttcctggtgaaatggcaggatttgtc

SEQ ID NO: 17513 - RNA, 93 nt, synthetic construct
  source 1..93: mol_type = other RNA
acacagcaaagcctctttggaggctgaatggggtcccccgactctggctttcccccaggtgtacatgttcctggtgaaatggcaggatctgtc

SEQ ID NO: 17514 - RNA, 93 nt, synthetic construct
  source 1..93: mol_type = other RNA
acacagcaaagcctctttggaggctgaatggggtcccccgactctggctttcccccaggtctacatgttcctggtgaaatggcaggatttatc

SEQ ID NO: 17515 - RNA, 93 nt, synthetic construct
  source 1..93: mol_type = other RNA
acacagcaaagcctctttggaggctgaatggggtcccccgactctggctttcccccaggtttacatgttcctggtgaaatggcaggacctgtc

SEQ ID NO: 17516 - RNA, 93 nt, synthetic construct
  source 1..93: mol_type = other RNA
acacagcaaagcctctttggaggctgaatggggtcccccgactctggctttcccccaggtgtacatgttcctggtgaaatggcaggatttatc

SEQ ID NO: 17517 - RNA, 93 nt, synthetic construct
  source 1..93: mol_type = other RNA
acacagcaaagcctctttggaggctgaatggggtcccccgactctggctttcccccaggtgtacatgttcctggtgaaatggcaggatttgtc

SEQ ID NO: 17518 - RNA, 94 nt, synthetic construct
  source 1..94: mol_type = other RNA
cacacagcaaagcctctttggaggctgaatggggtcccccgactctggctttcccccaggtatacatgttcctggtgaaatggcaggacttgtc

SEQ ID NO: 17519 - RNA, 94 nt, synthetic construct
  source 1..94: mol_type = other RNA
cacacagcaaagcctctttggaggctgaatggggtcccccgactctggctttcccccaggtttacatgttcctggtgaaatggcaggacttatc

SEQ ID NO: 17520 - RNA, 94 nt, synthetic construct
  source 1..94: mol_type = other RNA
cacacagcaaagcctctttggaggctgaatggggtcccccgactctggctttcccccaggtttacatgttcctggtgaaatggcaggacttgtc

SEQ ID NO: 17521 - RNA, 94 nt, synthetic construct
  source 1..94: mol_type = other RNA
cacacagcaaagcctctttggaggctgaatggggtcccccgactctggctttcccccaggtgtacatgttcctggtgaaatggcaggatttgtc

SEQ ID NO: 17522 - RNA, 94 nt, synthetic construct
  source 1..94: mol_type = other RNA
cacacagcaaagcctctttggaggctgaatggggtcccccgactctggctttcccccaggtgtacatgttcctggtgaaatggcaggatttatc

SEQ ID NO: 17523 - RNA, 94 nt, synthetic construct
  source 1..94: mol_type = other RNA
cacacagcaaagcctctttggaggctgaatggggtcccccgactctggctttcccccaggtttacatgttcctggtgaaatggcaggatctgtc

SEQ ID NO: 17524 - RNA, 94 nt, synthetic construct
  source 1..94: mol_type = other RNA
cacacagcaaagcctctttggaggctgaatggggtcccccgactctggctttcccccaggtttacatgttcctggtgaaatggcaggatttgtc

SEQ ID NO: 17525 - RNA, 94 nt, synthetic construct
  source 1..94: mol_type = other RNA
cacacagcaaagcctctttggaggctgaatggggtcccccgactctggctttcccccaggtttacatgttcctggtgaaatggcaggatttatc

SEQ ID NO: 17526 - RNA, 94 nt, synthetic construct
  source 1..94: mol_type = other RNA
cacacagcaaagcctctttggaggctgaatggggtcccccgactctggctttcccccaggtgtacatgttcctggtgaaatggcaggacttgtc

SEQ ID NO: 17527 - RNA, 94 nt, synthetic construct
  source 1..94: mol_type = other RNA
cacacagcaaagcctctttggaggctgaatggggtcccccgactctggctttcccccaggtatacatgttcctggtgaaatggcaggatttgtc

SEQ ID NO: 17528 - RNA, 94 nt, synthetic construct
  source 1..94: mol_type = other RNA
cacacagcaaagcctctttggaggctgaatggggtcccccgactctggctttcccccaggtctacatgttcctggtgaaatggcaggacttatc

SEQ ID NO: 17529 - RNA, 94 nt, synthetic construct
  source 1..94: mol_type = other RNA
cacacagcaaagcctctttggaggctgaatggggtcccccgactctggctttcccccaggtctacatgttcctggtgaaatggcaggacttgtc

SEQ ID NO: 17530 - RNA, 94 nt, synthetic construct
  source 1..94: mol_type = other RNA
cacacagcaaagcctctttggaggctgaatggggtcccccgactctggctttcccccaggtctacatgttcctggtgaaatggcaggatctgtc

SEQ ID NO: 17531 - RNA, 94 nt, synthetic construct
  source 1..94: mol_type = other RNA
cacacagcaaagcctctttggaggctgaatggggtcccccgactctggctttcccccaggtctacatgttcctggtgaaatggcaggatttgtc

SEQ ID NO: 17532 - RNA, 94 nt, synthetic construct
  source 1..94: mol_type = other RNA
cacacagcaaagcctctttggaggctgaatggggtcccccgactctggctttcccccaggtatacatgttcctggtgaaatggcaggatttatc

SEQ ID NO: 17533 - RNA, 94 nt, synthetic construct
  source 1..94: mol_type = other RNA
cacacagcaaagcctctttggaggctgaatggggtcccccgactctggctttcccccaggtgtacatgttcctggtgaaatggcaggacctgtc

SEQ ID NO: 17534 - RNA, 94 nt, synthetic construct
  source 1..94: mol_type = other RNA
cacacagcaaagcctctttggaggctgaatggggtcccccgactctggctttcccccaggtgtacatgttcctggtgaaatggcaggacttatc

SEQ ID NO: 17535 - RNA, 94 nt, synthetic construct
  source 1..94: mol_type = other RNA
cacacagcaaagcctctttggaggctgaatggggtcccccgactctggctttcccccaggtctacatgttcctggtgaaatggcaggacctgtc

SEQ ID NO: 17536 - RNA, 94 nt, synthetic construct
  source 1..94: mol_type = other RNA
cacacagcaaagcctctttggaggctgaatggggtcccccgactctggctttcccccaggtgtacatgttcctggtgaaatggcaggatctgtc

SEQ ID NO: 17537 - RNA, 94 nt, synthetic construct
  source 1..94: mol_type = other RNA
cacacagcaaagcctctttggaggctgaatggggtcccccgactctggctttcccccaggtatacatgttcctggtgaaatggcaggatctgtc

SEQ ID NO: 17538 - RNA, 94 nt, synthetic construct
  source 1..94: mol_type = other RNA
cacacagcaaagcctctttggaggctgaatggggtcccccgactctggctttcccccaggtatacatgttcctggtgaaatggcaggacctgtc

SEQ ID NO: 17539 - RNA, 94 nt, synthetic construct
  source 1..94: mol_type = other RNA
cacacagcaaagcctctttggaggctgaatggggtcccccgactctggctttcccccaggtatacatgttcctggtgaaatggcaggacttatc

SEQ ID NO: 17540 - RNA, 94 nt, synthetic construct
  source 1..94: mol_type = other RNA
cacacagcaaagcctctttggaggctgaatggggtcccccgactctggctttcccccaggtttacatgttcctggtgaaatggcaggacctgtc

SEQ ID NO: 17541 - RNA, 94 nt, synthetic construct
  source 1..94: mol_type = other RNA
cacacagcaaagcctctttggaggctgaatggggtcccccgactctggctttcccccaggtctacatgttcctggtgaaatggcaggatttatc

SEQ ID NO: 17542 - RNA, 95 nt, synthetic construct
  source 1..95: mol_type = other RNA
gcacacagcaaagcctctttggaggctgaatggggtcccccgactctggctttcccccaggtttacatgttcctggtgaaatggcaggatctgtc

SEQ ID NO: 17543 - RNA, 95 nt, synthetic construct
  source 1..95: mol_type = other RNA
gcacacagcaaagcctctttggaggctgaatggggtcccccgactctggctttcccccaggtttacatgttcctggtgaaatggcaggatttatc

SEQ ID NO: 17544 - RNA, 95 nt, synthetic construct
  source 1..95: mol_type = other RNA
gcacacagcaaagcctctttggaggctgaatggggtcccccgactctggctttcccccaggtgtacatgttcctggtgaaatggcaggacctgtc

SEQ ID NO: 17545 - RNA, 95 nt, synthetic construct
  source 1..95: mol_type = other RNA
gcacacagcaaagcctctttggaggctgaatggggtcccccgactctggctttcccccaggtgtacatgttcctggtgaaatggcaggacttatc

SEQ ID NO: 17546 - RNA, 95 nt, synthetic construct
  source 1..95: mol_type = other RNA
gcacacagcaaagcctctttggaggctgaatggggtcccccgactctggctttcccccaggtgtacatgttcctggtgaaatggcaggacttgtc

SEQ ID NO: 17547 - RNA, 95 nt, synthetic construct
  source 1..95: mol_type = other RNA
gcacacagcaaagcctctttggaggctgaatggggtcccccgactctggctttcccccaggtctacatgttcctggtgaaatggcaggatttatc

SEQ ID NO: 17548 - RNA, 95 nt, synthetic construct
  source 1..95: mol_type = other RNA
gcacacagcaaagcctctttggaggctgaatggggtcccccgactctggctttcccccaggtgtacatgttcctggtgaaatggcaggatctgtc

SEQ ID NO: 17549 - RNA, 95 nt, synthetic construct
  source 1..95: mol_type = other RNA
gcacacagcaaagcctctttggaggctgaatggggtcccccgactctggctttcccccaggtgtacatgttcctggtgaaatggcaggatttatc

SEQ ID NO: 17550 - RNA, 95 nt, synthetic construct
  source 1..95: mol_type = other RNA
gcacacagcaaagcctctttggaggctgaatggggtcccccgactctggctttcccccaggtgtacatgttcctggtgaaatggcaggatttgtc

SEQ ID NO: 17551 - RNA, 95 nt, synthetic construct
  source 1..95: mol_type = other RNA
gcacacagcaaagcctctttggaggctgaatggggtcccccgactctggctttcccccaggtttacatgttcctggtgaaatggcaggacctgtc

SEQ ID NO: 17552 - RNA, 95 nt, synthetic construct
  source 1..95: mol_type = other RNA
gcacacagcaaagcctctttggaggctgaatggggtcccccgactctggctttcccccaggtttacatgttcctggtgaaatggcaggacttatc

SEQ ID NO: 17553 - RNA, 95 nt, synthetic construct
  source 1..95: mol_type = other RNA
gcacacagcaaagcctctttggaggctgaatggggtcccccgactctggctttcccccaggtttacatgttcctggtgaaatggcaggacttgtc

SEQ ID NO: 17554 - RNA, 95 nt, synthetic construct
  source 1..95: mol_type = other RNA
gcacacagcaaagcctctttggaggctgaatggggtcccccgactctggctttcccccaggtttacatgttcctggtgaaatggcaggatttgtc

SEQ ID NO: 17555 - RNA, 95 nt, synthetic construct
  source 1..95: mol_type = other RNA
gcacacagcaaagcctctttggaggctgaatggggtcccccgactctggctttcccccaggtctacatgttcctggtgaaatggcaggatctgtc

SEQ ID NO: 17556 - RNA, 95 nt, synthetic construct
  source 1..95: mol_type = other RNA
gcacacagcaaagcctctttggaggctgaatggggtcccccgactctggctttcccccaggtctacatgttcctggtgaaatggcaggacttgtc

SEQ ID NO: 17557 - RNA, 95 nt, synthetic construct
  source 1..95: mol_type = other RNA
gcacacagcaaagcctctttggaggctgaatggggtcccccgactctggctttcccccaggtctacatgttcctggtgaaatggcaggacttatc

SEQ ID NO: 17558 - RNA, 95 nt, synthetic construct
  source 1..95: mol_type = other RNA
gcacacagcaaagcctctttggaggctgaatggggtcccccgactctggctttcccccaggtatacatgttcctggtgaaatggcaggatttgtc

SEQ ID NO: 17559 - RNA, 95 nt, synthetic construct
  source 1..95: mol_type = other RNA
gcacacagcaaagcctctttggaggctgaatggggtcccccgactctggctttcccccaggtatacatgttcctggtgaaatggcaggatttatc

SEQ ID NO: 17560 - RNA, 95 nt, synthetic construct
  source 1..95: mol_type = other RNA
gcacacagcaaagcctctttggaggctgaatggggtcccccgactctggctttcccccaggtatacatgttcctggtgaaatggcaggatctgtc

SEQ ID NO: 17561 - RNA, 95 nt, synthetic construct
  source 1..95: mol_type = other RNA
gcacacagcaaagcctctttggaggctgaatggggtcccccgactctggctttcccccaggtatacatgttcctggtgaaatggcaggacttgtc

SEQ ID NO: 17562 - RNA, 95 nt, synthetic construct
  source 1..95: mol_type = other RNA
gcacacagcaaagcctctttggaggctgaatggggtcccccgactctggctttcccccaggtatacatgttcctggtgaaatggcaggacttatc

SEQ ID NO: 17563 - RNA, 95 nt, synthetic construct
  source 1..95: mol_type = other RNA
gcacacagcaaagcctctttggaggctgaatggggtcccccgactctggctttcccccaggtatacatgttcctggtgaaatggcaggacctgtc

SEQ ID NO: 17564 - RNA, 95 nt, synthetic construct
  source 1..95: mol_type = other RNA
gcacacagcaaagcctctttggaggctgaatggggtcccccgactctggctttcccccaggtctacatgttcctggtgaaatggcaggacctgtc

SEQ ID NO: 17565 - RNA, 95 nt, synthetic construct
  source 1..95: mol_type = other RNA
gcacacagcaaagcctctttggaggctgaatggggtcccccgactctggctttcccccaggtctacatgttcctggtgaaatggcaggatttgtc

SEQ ID NO: 17566 - RNA, 96 nt, synthetic construct
  source 1..96: mol_type = other RNA
tgcacacagcaaagcctctttggaggctgaatggggtcccccgactctggctttcccccaggtgtacatgttcctggtgaaatggcaggatttatc

SEQ ID NO: 17567 - RNA, 96 nt, synthetic construct
  source 1..96: mol_type = other RNA
tgcacacagcaaagcctctttggaggctgaatggggtcccccgactctggctttcccccaggtttacatgttcctggtgaaatggcaggacctgtc

SEQ ID NO: 17568 - RNA, 96 nt, synthetic construct
  source 1..96: mol_type = other RNA
tgcacacagcaaagcctctttggaggctgaatggggtcccccgactctggctttcccccaggtgtacatgttcctggtgaaatggcaggatctgtc

SEQ ID NO: 17569 - RNA, 96 nt, synthetic construct
  source 1..96: mol_type = other RNA
tgcacacagcaaagcctctttggaggctgaatggggtcccccgactctggctttcccccaggtctacatgttcctggtgaaatggcaggatttgtc

SEQ ID NO: 17570 - RNA, 96 nt, synthetic construct
  source 1..96: mol_type = other RNA
tgcacacagcaaagcctctttggaggctgaatggggtcccccgactctggctttcccccaggtctacatgttcctggtgaaatggcaggacttatc

SEQ ID NO: 17571 - RNA, 96 nt, synthetic construct
  source 1..96: mol_type = other RNA
tgcacacagcaaagcctctttggaggctgaatggggtcccccgactctggctttcccccaggtctacatgttcctggtgaaatggcaggatctgtc

SEQ ID NO: 17572 - RNA, 96 nt, synthetic construct
  source 1..96: mol_type = other RNA
tgcacacagcaaagcctctttggaggctgaatggggtcccccgactctggctttcccccaggtttacatgttcctggtgaaatggcaggacttgtc

SEQ ID NO: 17573 - RNA, 96 nt, synthetic construct
  source 1..96: mol_type = other RNA
tgcacacagcaaagcctctttggaggctgaatggggtcccccgactctggctttcccccaggtttacatgttcctggtgaaatggcaggatctgtc

SEQ ID NO: 17574 - RNA, 96 nt, synthetic construct
  source 1..96: mol_type = other RNA
tgcacacagcaaagcctctttggaggctgaatggggtcccccgactctggctttcccccaggtttacatgttcctggtgaaatggcaggatttatc

SEQ ID NO: 17575 - RNA, 96 nt, synthetic construct
  source 1..96: mol_type = other RNA
tgcacacagcaaagcctctttggaggctgaatggggtcccccgactctggctttcccccaggtttacatgttcctggtgaaatggcaggatttgtc

SEQ ID NO: 17576 - RNA, 96 nt, synthetic construct
  source 1..96: mol_type = other RNA
tgcacacagcaaagcctctttggaggctgaatggggtcccccgactctggctttcccccaggtgtacatgttcctggtgaaatggcaggatttgtc

SEQ ID NO: 17577 - RNA, 96 nt, synthetic construct
  source 1..96: mol_type = other RNA
tgcacacagcaaagcctctttggaggctgaatggggtcccccgactctggctttcccccaggtctacatgttcctggtgaaatggcaggacctgtc

SEQ ID NO: 17578 - RNA, 96 nt, synthetic construct
  source 1..96: mol_type = other RNA
tgcacacagcaaagcctctttggaggctgaatggggtcccccgactctggctttcccccaggtctacatgttcctggtgaaatggcaggacttgtc

SEQ ID NO: 17579 - RNA, 96 nt, synthetic construct
  source 1..96: mol_type = other RNA
tgcacacagcaaagcctctttggaggctgaatggggtcccccgactctggctttcccccaggtatacatgttcctggtgaaatggcaggacctgtc

SEQ ID NO: 17580 - RNA, 96 nt, synthetic construct
  source 1..96: mol_type = other RNA
tgcacacagcaaagcctctttggaggctgaatggggtcccccgactctggctttcccccaggtatacatgttcctggtgaaatggcaggacttatc

SEQ ID NO: 17581 - RNA, 96 nt, synthetic construct
  source 1..96: mol_type = other RNA
tgcacacagcaaagcctctttggaggctgaatggggtcccccgactctggctttcccccaggtatacatgttcctggtgaaatggcaggacttgtc

SEQ ID NO: 17582 - RNA, 96 nt, synthetic construct
  source 1..96: mol_type = other RNA
tgcacacagcaaagcctctttggaggctgaatggggtcccccgactctggctttcccccaggtatacatgttcctggtgaaatggcaggatttatc

SEQ ID NO: 17583 - RNA, 96 nt, synthetic construct
  source 1..96: mol_type = other RNA
tgcacacagcaaagcctctttggaggctgaatggggtcccccgactctggctttcccccaggtatacatgttcctggtgaaatggcaggatttgtc

SEQ ID NO: 17584 - RNA, 96 nt, synthetic construct
  source 1..96: mol_type = other RNA
tgcacacagcaaagcctctttggaggctgaatggggtcccccgactctggctttcccccaggtatacatgttcctggtgaaatggcaggatctgtc

SEQ ID NO: 17585 - RNA, 96 nt, synthetic construct
  source 1..96: mol_type = other RNA
tgcacacagcaaagcctctttggaggctgaatggggtcccccgactctggctttcccccaggtgtacatgttcctggtgaaatggcaggacttgtc

SEQ ID NO: 17586 - RNA, 96 nt, synthetic construct
  source 1..96: mol_type = other RNA
tgcacacagcaaagcctctttggaggctgaatggggtcccccgactctggctttcccccaggtgtacatgttcctggtgaaatggcaggacttatc

SEQ ID NO: 17587 - RNA, 96 nt, synthetic construct
  source 1..96: mol_type = other RNA
tgcacacagcaaagcctctttggaggctgaatggggtcccccgactctggctttcccccaggtttacatgttcctggtgaaatggcaggacttatc

SEQ ID NO: 17588 - RNA, 96 nt, synthetic construct
  source 1..96: mol_type = other RNA
tgcacacagcaaagcctctttggaggctgaatggggtcccccgactctggctttcccccaggtgtacatgttcctggtgaaatggcaggacctgtc

SEQ ID NO: 17589 - RNA, 96 nt, synthetic construct
  source 1..96: mol_type = other RNA
tgcacacagcaaagcctctttggaggctgaatggggtcccccgactctggctttcccccaggtctacatgttcctggtgaaatggcaggatttatc

SEQ ID NO: 17590 - RNA, 97 nt, synthetic construct
  source 1..97: mol_type = other RNA
gtgcacacagcaaagcctctttggaggctgaatggggtcccccgactctggctttcccccaggtctacatgttcctggtgaaatggcaggatctgtc

SEQ ID NO: 17591 - RNA, 97 nt, synthetic construct
  source 1..97: mol_type = other RNA
gtgcacacagcaaagcctctttggaggctgaatggggtcccccgactctggctttcccccaggtgtacatgttcctggtgaaatggcaggatttatc

SEQ ID NO: 17592 - RNA, 97 nt, synthetic construct
  source 1..97: mol_type = other RNA
gtgcacacagcaaagcctctttggaggctgaatggggtcccccgactctggctttcccccaggtgtacatgttcctggtgaaatggcaggacttatc

SEQ ID NO: 17593 - RNA, 97 nt, synthetic construct
  source 1..97: mol_type = other RNA
gtgcacacagcaaagcctctttggaggctgaatggggtcccccgactctggctttcccccaggtgtacatgttcctggtgaaatggcaggacttgtc

SEQ ID NO: 17594 - RNA, 97 nt, synthetic construct
  source 1..97: mol_type = other RNA
gtgcacacagcaaagcctctttggaggctgaatggggtcccccgactctggctttcccccaggtgtacatgttcctggtgaaatggcaggatctgtc

SEQ ID NO: 17595 - RNA, 97 nt, synthetic construct
  source 1..97: mol_type = other RNA
gtgcacacagcaaagcctctttggaggctgaatggggtcccccgactctggctttcccccaggtttacatgttcctggtgaaatggcaggacttatc

SEQ ID NO: 17596 - RNA, 97 nt, synthetic construct
  source 1..97: mol_type = other RNA
gtgcacacagcaaagcctctttggaggctgaatggggtcccccgactctggctttcccccaggtgtacatgttcctggtgaaatggcaggacctgtc

SEQ ID NO: 17597 - RNA, 97 nt, synthetic construct
  source 1..97: mol_type = other RNA
gtgcacacagcaaagcctctttggaggctgaatggggtcccccgactctggctttcccccaggtttacatgttcctggtgaaatggcaggatttatc

SEQ ID NO: 17598 - RNA, 97 nt, synthetic construct
  source 1..97: mol_type = other RNA
gtgcacacagcaaagcctctttggaggctgaatggggtcccccgactctggctttcccccaggtttacatgttcctggtgaaatggcaggacctgtc

SEQ ID NO: 17599 - RNA, 97 nt, synthetic construct
  source 1..97: mol_type = other RNA
gtgcacacagcaaagcctctttggaggctgaatggggtcccccgactctggctttcccccaggtctacatgttcctggtgaaatggcaggatttgtc

SEQ ID NO: 17600 - RNA, 97 nt, synthetic construct
  source 1..97: mol_type = other RNA
gtgcacacagcaaagcctctttggaggctgaatggggtcccccgactctggctttcccccaggtttacatgttcctggtgaaatggcaggatttgtc

SEQ ID NO: 17601 - RNA, 97 nt, synthetic construct
  source 1..97: mol_type = other RNA
gtgcacacagcaaagcctctttggaggctgaatggggtcccccgactctggctttcccccaggtgtacatgttcctggtgaaatggcaggatttgtc

SEQ ID NO: 17602 - RNA, 97 nt, synthetic construct
  source 1..97: mol_type = other RNA
gtgcacacagcaaagcctctttggaggctgaatggggtcccccgactctggctttcccccaggtctacatgttcctggtgaaatggcaggacttgtc

SEQ ID NO: 17603 - RNA, 97 nt, synthetic construct
  source 1..97: mol_type = other RNA
gtgcacacagcaaagcctctttggaggctgaatggggtcccccgactctggctttcccccaggtatacatgttcctggtgaaatggcaggacttgtc

SEQ ID NO: 17604 - RNA, 97 nt, synthetic construct
  source 1..97: mol_type = other RNA
gtgcacacagcaaagcctctttggaggctgaatggggtcccccgactctggctttcccccaggtctacatgttcctggtgaaatggcaggacttatc

SEQ ID NO: 17605 - RNA, 97 nt, synthetic construct
  source 1..97: mol_type = other RNA
gtgcacacagcaaagcctctttggaggctgaatggggtcccccgactctggctttcccccaggtctacatgttcctggtgaaatggcaggatttatc

SEQ ID NO: 17606 - RNA, 97 nt, synthetic construct
  source 1..97: mol_type = other RNA
gtgcacacagcaaagcctctttggaggctgaatggggtcccccgactctggctttcccccaggtatacatgttcctggtgaaatggcaggacctgtc

SEQ ID NO: 17607 - RNA, 97 nt, synthetic construct
  source 1..97: mol_type = other RNA
gtgcacacagcaaagcctctttggaggctgaatggggtcccccgactctggctttcccccaggtatacatgttcctggtgaaatggcaggacttatc

SEQ ID NO: 17608 - RNA, 97 nt, synthetic construct
  source 1..97: mol_type = other RNA
gtgcacacagcaaagcctctttggaggctgaatggggtcccccgactctggctttcccccaggtatacatgttcctggtgaaatggcaggatctgtc

SEQ ID NO: 17609 - RNA, 97 nt, synthetic construct
  source 1..97: mol_type = other RNA
gtgcacacagcaaagcctctttggaggctgaatggggtcccccgactctggctttcccccaggtttacatgttcctggtgaaatggcaggacttgtc

SEQ ID NO: 17610 - RNA, 97 nt, synthetic construct
  source 1..97: mol_type = other RNA
gtgcacacagcaaagcctctttggaggctgaatggggtcccccgactctggctttcccccaggtttacatgttcctggtgaaatggcaggatctgtc

SEQ ID NO: 17611 - RNA, 97 nt, synthetic construct
  source 1..97: mol_type = other RNA
gtgcacacagcaaagcctctttggaggctgaatggggtcccccgactctggctttcccccaggtatacatgttcctggtgaaatggcaggatttgtc

SEQ ID NO: 17612 - RNA, 97 nt, synthetic construct
  source 1..97: mol_type = other RNA
gtgcacacagcaaagcctctttggaggctgaatggggtcccccgactctggctttcccccaggtctacatgttcctggtgaaatggcaggacctgtc

SEQ ID NO: 17613 - RNA, 97 nt, synthetic construct
  source 1..97: mol_type = other RNA
gtgcacacagcaaagcctctttggaggctgaatggggtcccccgactctggctttcccccaggtatacatgttcctggtgaaatggcaggatttatc

SEQ ID NO: 17614 - RNA, 98 nt, synthetic construct
  source 1..98: mol_type = other RNA
ggtgcacacagcaaagcctctttggaggctgaatggggtcccccgactctggctttcccccaggtctacatgttcctggtgaaatggcaggacttgtc

SEQ ID NO: 17615 - RNA, 98 nt, synthetic construct
  source 1..98: mol_type = other RNA
ggtgcacacagcaaagcctctttggaggctgaatggggtcccccgactctggctttcccccaggtttacatgttcctggtgaaatggcaggatttatc

SEQ ID NO: 17616 - RNA, 98 nt, synthetic construct
  source 1..98: mol_type = other RNA
ggtgcacacagcaaagcctctttggaggctgaatggggtcccccgactctggctttcccccaggtatacatgttcctggtgaaatggcaggacttatc

SEQ ID NO: 17617 - RNA, 98 nt, synthetic construct
  source 1..98: mol_type = other RNA
ggtgcacacagcaaagcctctttggaggctgaatggggtcccccgactctggctttcccccaggtctacatgttcctggtgaaatggcaggacttatc

SEQ ID NO: 17618 - RNA, 98 nt, synthetic construct
  source 1..98: mol_type = other RNA
ggtgcacacagcaaagcctctttggaggctgaatggggtcccccgactctggctttcccccaggtatacatgttcctggtgaaatggcaggacctgtc

SEQ ID NO: 17619 - RNA, 98 nt, synthetic construct
  source 1..98: mol_type = other RNA
ggtgcacacagcaaagcctctttggaggctgaatggggtcccccgactctggctttcccccaggtatacatgttcctggtgaaatggcaggacttgtc

SEQ ID NO: 17620 - RNA, 98 nt, synthetic construct
  source 1..98: mol_type = other RNA
ggtgcacacagcaaagcctctttggaggctgaatggggtcccccgactctggctttcccccaggtctacatgttcctggtgaaatggcaggacctgtc

SEQ ID NO: 17621 - RNA, 98 nt, synthetic construct
  source 1..98: mol_type = other RNA
ggtgcacacagcaaagcctctttggaggctgaatggggtcccccgactctggctttcccccaggtctacatgttcctggtgaaatggcaggatctgtc

SEQ ID NO: 17622 - RNA, 98 nt, synthetic construct
  source 1..98: mol_type = other RNA
ggtgcacacagcaaagcctctttggaggctgaatggggtcccccgactctggctttcccccaggtctacatgttcctggtgaaatggcaggatttatc

SEQ ID NO: 17623 - RNA, 98 nt, synthetic construct
  source 1..98: mol_type = other RNA
ggtgcacacagcaaagcctctttggaggctgaatggggtcccccgactctggctttcccccaggtgtacatgttcctggtgaaatggcaggacctgtc

SEQ ID NO: 17624 - RNA, 98 nt, synthetic construct
  source 1..98: mol_type = other RNA
ggtgcacacagcaaagcctctttggaggctgaatggggtcccccgactctggctttcccccaggtgtacatgttcctggtgaaatggcaggatctgtc

SEQ ID NO: 17625 - RNA, 98 nt, synthetic construct
  source 1..98: mol_type = other RNA
ggtgcacacagcaaagcctctttggaggctgaatggggtcccccgactctggctttcccccaggtatacatgttcctggtgaaatggcaggatttatc

SEQ ID NO: 17626 - RNA, 98 nt, synthetic construct
  source 1..98: mol_type = other RNA
ggtgcacacagcaaagcctctttggaggctgaatggggtcccccgactctggctttcccccaggtatacatgttcctggtgaaatggcaggatttgtc

SEQ ID NO: 17627 - RNA, 98 nt, synthetic construct
  source 1..98: mol_type = other RNA
ggtgcacacagcaaagcctctttggaggctgaatggggtcccccgactctggctttcccccaggtatacatgttcctggtgaaatggcaggatctgtc

SEQ ID NO: 17628 - RNA, 98 nt, synthetic construct
  source 1..98: mol_type = other RNA
ggtgcacacagcaaagcctctttggaggctgaatggggtcccccgactctggctttcccccaggtgtacatgttcctggtgaaatggcaggatttatc

SEQ ID NO: 17629 - RNA, 98 nt, synthetic construct
  source 1..98: mol_type = other RNA
ggtgcacacagcaaagcctctttggaggctgaatggggtcccccgactctggctttcccccaggtttacatgttcctggtgaaatggcaggacttgtc

SEQ ID NO: 17630 - RNA, 98 nt, synthetic construct
  source 1..98: mol_type = other RNA
ggtgcacacagcaaagcctctttggaggctgaatggggtcccccgactctggctttcccccaggtttacatgttcctggtgaaatggcaggacttatc

SEQ ID NO: 17631 - RNA, 98 nt, synthetic construct
  source 1..98: mol_type = other RNA
ggtgcacacagcaaagcctctttggaggctgaatggggtcccccgactctggctttcccccaggtttacatgttcctggtgaaatggcaggacctgtc

SEQ ID NO: 17632 - RNA, 98 nt, synthetic construct
  source 1..98: mol_type = other RNA
ggtgcacacagcaaagcctctttggaggctgaatggggtcccccgactctggctttcccccaggtgtacatgttcctggtgaaatggcaggatttgtc

SEQ ID NO: 17633 - RNA, 98 nt, synthetic construct
  source 1..98: mol_type = other RNA
ggtgcacacagcaaagcctctttggaggctgaatggggtcccccgactctggctttcccccaggtttacatgttcctggtgaaatggcaggatttgtc

SEQ ID NO: 17634 - RNA, 98 nt, synthetic construct
  source 1..98: mol_type = other RNA
ggtgcacacagcaaagcctctttggaggctgaatggggtcccccgactctggctttcccccaggtgtacatgttcctggtgaaatggcaggacttgtc

SEQ ID NO: 17635 - RNA, 98 nt, synthetic construct
  source 1..98: mol_type = other RNA
ggtgcacacagcaaagcctctttggaggctgaatggggtcccccgactctggctttcccccaggtttacatgttcctggtgaaatggcaggatctgtc

SEQ ID NO: 17636 - RNA, 98 nt, synthetic construct
  source 1..98: mol_type = other RNA
ggtgcacacagcaaagcctctttggaggctgaatggggtcccccgactctggctttcccccaggtgtacatgttcctggtgaaatggcaggacttatc

SEQ ID NO: 17637 - RNA, 98 nt, synthetic construct
  source 1..98: mol_type = other RNA
ggtgcacacagcaaagcctctttggaggctgaatggggtcccccgactctggctttcccccaggtctacatgttcctggtgaaatggcaggatttgtc

SEQ ID NO: 17638 - RNA, 99 nt, synthetic construct
  source 1..99: mol_type = other RNA
gggtgcacacagcaaagcctctttggaggctgaatggggtcccccgactctggctttcccccaggtatacatgttcctggtgaaatggcaggacttgtc

SEQ ID NO: 17639 - RNA, 99 nt, synthetic construct
  source 1..99: mol_type = other RNA
gggtgcacacagcaaagcctctttggaggctgaatggggtcccccgactctggctttcccccaggtatacatgttcctggtgaaatggcaggatttatc

SEQ ID NO: 17640 - RNA, 99 nt, synthetic construct
  source 1..99: mol_type = other RNA
gggtgcacacagcaaagcctctttggaggctgaatggggtcccccgactctggctttcccccaggtatacatgttcctggtgaaatggcaggatttgtc

SEQ ID NO: 17641 - RNA, 99 nt, synthetic construct
  source 1..99: mol_type = other RNA
gggtgcacacagcaaagcctctttggaggctgaatggggtcccccgactctggctttcccccaggtttacatgttcctggtgaaatggcaggatctgtc

SEQ ID NO: 17642 - RNA, 99 nt, synthetic construct
  source 1..99: mol_type = other RNA
gggtgcacacagcaaagcctctttggaggctgaatggggtcccccgactctggctttcccccaggtctacatgttcctggtgaaatggcaggacttatc

SEQ ID NO: 17643 - RNA, 99 nt, synthetic construct
  source 1..99: mol_type = other RNA
gggtgcacacagcaaagcctctttggaggctgaatggggtcccccgactctggctttcccccaggtatacatgttcctggtgaaatggcaggatctgtc

SEQ ID NO: 17644 - RNA, 99 nt, synthetic construct
  source 1..99: mol_type = other RNA
gggtgcacacagcaaagcctctttggaggctgaatggggtcccccgactctggctttcccccaggtctacatgttcctggtgaaatggcaggatctgtc

SEQ ID NO: 17645 - RNA, 99 nt, synthetic construct
  source 1..99: mol_type = other RNA
gggtgcacacagcaaagcctctttggaggctgaatggggtcccccgactctggctttcccccaggtctacatgttcctggtgaaatggcaggatttatc

SEQ ID NO: 17646 - RNA, 99 nt, synthetic construct
  source 1..99: mol_type = other RNA
gggtgcacacagcaaagcctctttggaggctgaatggggtcccccgactctggctttcccccaggtgtacatgttcctggtgaaatggcaggatttatc

SEQ ID NO: 17647 - RNA, 99 nt, synthetic construct
  source 1..99: mol_type = other RNA
gggtgcacacagcaaagcctctttggaggctgaatggggtcccccgactctggctttcccccaggtttacatgttcctggtgaaatggcaggatttgtc

SEQ ID NO: 17648 - RNA, 99 nt, synthetic construct
  source 1..99: mol_type = other RNA
gggtgcacacagcaaagcctctttggaggctgaatggggtcccccgactctggctttcccccaggtatacatgttcctggtgaaatggcaggacttatc

SEQ ID NO: 17649 - RNA, 99 nt, synthetic construct
  source 1..99: mol_type = other RNA
gggtgcacacagcaaagcctctttggaggctgaatggggtcccccgactctggctttcccccaggtttacatgttcctggtgaaatggcaggatttatc

SEQ ID NO: 17650 - RNA, 99 nt, synthetic construct
  source 1..99: mol_type = other RNA
gggtgcacacagcaaagcctctttggaggctgaatggggtcccccgactctggctttcccccaggtttacatgttcctggtgaaatggcaggacttgtc

SEQ ID NO: 17651 - RNA, 99 nt, synthetic construct
  source 1..99: mol_type = other RNA
gggtgcacacagcaaagcctctttggaggctgaatggggtcccccgactctggctttcccccaggtatacatgttcctggtgaaatggcaggacctgtc

SEQ ID NO: 17652 - RNA, 99 nt, synthetic construct
  source 1..99: mol_type = other RNA
gggtgcacacagcaaagcctctttggaggctgaatggggtcccccgactctggctttcccccaggtctacatgttcctggtgaaatggcaggacctgtc

SEQ ID NO: 17653 - RNA, 99 nt, synthetic construct
  source 1..99: mol_type = other RNA
gggtgcacacagcaaagcctctttggaggctgaatggggtcccccgactctggctttcccccaggtctacatgttcctggtgaaatggcaggacttgtc

SEQ ID NO: 17654 - RNA, 99 nt, synthetic construct
  source 1..99: mol_type = other RNA
gggtgcacacagcaaagcctctttggaggctgaatggggtcccccgactctggctttcccccaggtgtacatgttcctggtgaaatggcaggacttgtc

SEQ ID NO: 17655 - RNA, 99 nt, synthetic construct
  source 1..99: mol_type = other RNA
gggtgcacacagcaaagcctctttggaggctgaatggggtcccccgactctggctttcccccaggtgtacatgttcctggtgaaatggcaggatttgtc

SEQ ID NO: 17656 - RNA, 99 nt, synthetic construct
  source 1..99: mol_type = other RNA
gggtgcacacagcaaagcctctttggaggctgaatggggtcccccgactctggctttcccccaggtgtacatgttcctggtgaaatggcaggacttatc

SEQ ID NO: 17657 - RNA, 99 nt, synthetic construct
  source 1..99: mol_type = other RNA
gggtgcacacagcaaagcctctttggaggctgaatggggtcccccgactctggctttcccccaggtgtacatgttcctggtgaaatggcaggacctgtc

SEQ ID NO: 17658 - RNA, 99 nt, synthetic construct
  source 1..99: mol_type = other RNA
gggtgcacacagcaaagcctctttggaggctgaatggggtcccccgactctggctttcccccaggtgtacatgttcctggtgaaatggcaggatctgtc

SEQ ID NO: 17659 - RNA, 99 nt, synthetic construct
  source 1..99: mol_type = other RNA
gggtgcacacagcaaagcctctttggaggctgaatggggtcccccgactctggctttcccccaggtctacatgttcctggtgaaatggcaggatttgtc

SEQ ID NO: 17660 - RNA, 99 nt, synthetic construct
  source 1..99: mol_type = other RNA
gggtgcacacagcaaagcctctttggaggctgaatggggtcccccgactctggctttcccccaggtttacatgttcctggtgaaatggcaggacctgtc

SEQ ID NO: 17661 - RNA, 99 nt, synthetic construct
  source 1..99: mol_type = other RNA
gggtgcacacagcaaagcctctttggaggctgaatggggtcccccgactctggctttcccccaggtttacatgttcctggtgaaatggcaggacttatc

SEQ ID NO: 17662 - RNA, 100 nt, synthetic construct
  source 1..100: mol_type = other RNA
tgggtgcacacagcaaagcctctttggaggctgaatggggtcccccgactctggctttcccccaggtatacatgttcctggtgaaatggcaggatttatc

SEQ ID NO: 17663 - RNA, 100 nt, synthetic construct
  source 1..100: mol_type = other RNA
tgggtgcacacagcaaagcctctttggaggctgaatggggtcccccgactctggctttcccccaggtttacatgttcctggtgaaatggcaggacttatc

SEQ ID NO: 17664 - RNA, 100 nt, synthetic construct
  source 1..100: mol_type = other RNA
tgggtgcacacagcaaagcctctttggaggctgaatggggtcccccgactctggctttcccccaggtctacatgttcctggtgaaatggcaggacttatc

SEQ ID NO: 17665 - RNA, 100 nt, synthetic construct
  source 1..100: mol_type = other RNA
tgggtgcacacagcaaagcctctttggaggctgaatggggtcccccgactctggctttcccccaggtttacatgttcctggtgaaatggcaggatttgtc

SEQ ID NO: 17666 - RNA, 100 nt, synthetic construct
  source 1..100: mol_type = other RNA
tgggtgcacacagcaaagcctctttggaggctgaatggggtcccccgactctggctttcccccaggtatacatgttcctggtgaaatggcaggatttgtc

SEQ ID NO: 17667 - RNA, 100 nt, synthetic construct
  source 1..100: mol_type = other RNA
tgggtgcacacagcaaagcctctttggaggctgaatggggtcccccgactctggctttcccccaggtatacatgttcctggtgaaatggcaggatctgtc

SEQ ID NO: 17668 - RNA, 100 nt, synthetic construct
  source 1..100: mol_type = other RNA
tgggtgcacacagcaaagcctctttggaggctgaatggggtcccccgactctggctttcccccaggtatacatgttcctggtgaaatggcaggacttgtc

SEQ ID NO: 17669 - RNA, 100 nt, synthetic construct
  source 1..100: mol_type = other RNA
tgggtgcacacagcaaagcctctttggaggctgaatggggtcccccgactctggctttcccccaggtatacatgttcctggtgaaatggcaggacttatc

SEQ ID NO: 17670 - RNA, 100 nt, synthetic construct
  source 1..100: mol_type = other RNA
tgggtgcacacagcaaagcctctttggaggctgaatggggtcccccgactctggctttcccccaggtatacatgttcctggtgaaatggcaggacctgtc

SEQ ID NO: 17671 - RNA, 100 nt, synthetic construct
  source 1..100: mol_type = other RNA
tgggtgcacacagcaaagcctctttggaggctgaatggggtcccccgactctggctttcccccaggtttacatgttcctggtgaaatggcaggatctgtc

SEQ ID NO: 17672 - RNA, 100 nt, synthetic construct
  source 1..100: mol_type = other RNA
tgggtgcacacagcaaagcctctttggaggctgaatggggtcccccgactctggctttcccccaggtttacatgttcctggtgaaatggcaggatttatc

SEQ ID NO: 17673 - RNA, 100 nt, synthetic construct
  source 1..100: mol_type = other RNA
tgggtgcacacagcaaagcctctttggaggctgaatggggtcccccgactctggctttcccccaggtctacatgttcctggtgaaatggcaggacctgtc

SEQ ID NO: 17674 - RNA, 100 nt, synthetic construct
  source 1..100: mol_type = other RNA
tgggtgcacacagcaaagcctctttggaggctgaatggggtcccccgactctggctttcccccaggtgtacatgttcctggtgaaatggcaggacctgtc

SEQ ID NO: 17675 - RNA, 100 nt, synthetic construct
  source 1..100: mol_type = other RNA
tgggtgcacacagcaaagcctctttggaggctgaatggggtcccccgactctggctttcccccaggtctacatgttcctggtgaaatggcaggacttgtc

SEQ ID NO: 17676 - RNA, 100 nt, synthetic construct
  source 1..100: mol_type = other RNA
tgggtgcacacagcaaagcctctttggaggctgaatggggtcccccgactctggctttcccccaggtgtacatgttcctggtgaaatggcaggatctgtc

SEQ ID NO: 17677 - RNA, 100 nt, synthetic construct
  source 1..100: mol_type = other RNA
tgggtgcacacagcaaagcctctttggaggctgaatggggtcccccgactctggctttcccccaggtttacatgttcctggtgaaatggcaggacctgtc

SEQ ID NO: 17678 - RNA, 100 nt, synthetic construct
  source 1..100: mol_type = other RNA
tgggtgcacacagcaaagcctctttggaggctgaatggggtcccccgactctggctttcccccaggtctacatgttcctggtgaaatggcaggatctgtc

SEQ ID NO: 17679 - RNA, 100 nt, synthetic construct
  source 1..100: mol_type = other RNA
tgggtgcacacagcaaagcctctttggaggctgaatggggtcccccgactctggctttcccccaggtgtacatgttcctggtgaaatggcaggacttgtc

SEQ ID NO: 17680 - RNA, 100 nt, synthetic construct
  source 1..100: mol_type = other RNA
tgggtgcacacagcaaagcctctttggaggctgaatggggtcccccgactctggctttcccccaggtctacatgttcctggtgaaatggcaggatttatc

SEQ ID NO: 17681 - RNA, 100 nt, synthetic construct
  source 1..100: mol_type = other RNA
tgggtgcacacagcaaagcctctttggaggctgaatggggtcccccgactctggctttcccccaggtctacatgttcctggtgaaatggcaggatttgtc

SEQ ID NO: 17682 - RNA, 100 nt, synthetic construct
  source 1..100: mol_type = other RNA
tgggtgcacacagcaaagcctctttggaggctgaatggggtcccccgactctggctttcccccaggtgtacatgttcctggtgaaatggcaggacttatc

SEQ ID NO: 17683 - RNA, 100 nt, synthetic construct
  source 1..100: mol_type = other RNA
tgggtgcacacagcaaagcctctttggaggctgaatggggtcccccgactctggctttcccccaggtttacatgttcctggtgaaatggcaggacttgtc

SEQ ID NO: 17684 - RNA, 100 nt, synthetic construct
  source 1..100: mol_type = other RNA
tgggtgcacacagcaaagcctctttggaggctgaatggggtcccccgactctggctttcccccaggtgtacatgttcctggtgaaatggcaggatttatc

SEQ ID NO: 17685 - RNA, 100 nt, synthetic construct
  source 1..100: mol_type = other RNA
tgggtgcacacagcaaagcctctttggaggctgaatggggtcccccgactctggctttcccccaggtgtacatgttcctggtgaaatggcaggatttgtc

SEQ ID NO: 17686 - RNA, 101 nt, synthetic construct
  source 1..101: mol_type = other RNA
ctgggtgcacacagcaaagcctctttggaggctgaatggggtcccccgactctggctttcccccaggtctacatgttcctggtgaaatggcaggacctgtc

SEQ ID NO: 17687 - RNA, 101 nt, synthetic construct
  source 1..101: mol_type = other RNA
ctgggtgcacacagcaaagcctctttggaggctgaatggggtcccccgactctggctttcccccaggtatacatgttcctggtgaaatggcaggacttatc

SEQ ID NO: 17688 - RNA, 101 nt, synthetic construct
  source 1..101: mol_type = other RNA
ctgggtgcacacagcaaagcctctttggaggctgaatggggtcccccgactctggctttcccccaggtgtacatgttcctggtgaaatggcaggacttgtc

SEQ ID NO: 17689 - RNA, 101 nt, synthetic construct
  source 1..101: mol_type = other RNA
ctgggtgcacacagcaaagcctctttggaggctgaatggggtcccccgactctggctttcccccaggtatacatgttcctggtgaaatggcaggacttgtc

SEQ ID NO: 17690 - RNA, 101 nt, synthetic construct
  source 1..101: mol_type = other RNA
ctgggtgcacacagcaaagcctctttggaggctgaatggggtcccccgactctggctttcccccaggtgtacatgttcctggtgaaatggcaggatttgtc

SEQ ID NO: 17691 - RNA, 101 nt, synthetic construct
  source 1..101: mol_type = other RNA
ctgggtgcacacagcaaagcctctttggaggctgaatggggtcccccgactctggctttcccccaggtttacatgttcctggtgaaatggcaggatttgtc

SEQ ID NO: 17692 - RNA, 101 nt, synthetic construct
  source 1..101: mol_type = other RNA
ctgggtgcacacagcaaagcctctttggaggctgaatggggtcccccgactctggctttcccccaggtttacatgttcctggtgaaatggcaggatctgtc

SEQ ID NO: 17693 - RNA, 101 nt, synthetic construct
  source 1..101: mol_type = other RNA
ctgggtgcacacagcaaagcctctttggaggctgaatggggtcccccgactctggctttcccccaggtttacatgttcctggtgaaatggcaggatttatc

SEQ ID NO: 17694 - RNA, 101 nt, synthetic construct
  source 1..101: mol_type = other RNA
ctgggtgcacacagcaaagcctctttggaggctgaatggggtcccccgactctggctttcccccaggtttacatgttcctggtgaaatggcaggacttgtc

SEQ ID NO: 17695 - RNA, 101 nt, synthetic construct
  source 1..101: mol_type = other RNA
ctgggtgcacacagcaaagcctctttggaggctgaatggggtcccccgactctggctttcccccaggtttacatgttcctggtgaaatggcaggacttatc

SEQ ID NO: 17696 - RNA, 101 nt, synthetic construct
  source 1..101: mol_type = other RNA
ctgggtgcacacagcaaagcctctttggaggctgaatggggtcccccgactctggctttcccccaggtttacatgttcctggtgaaatggcaggacctgtc

SEQ ID NO: 17697 - RNA, 101 nt, synthetic construct
  source 1..101: mol_type = other RNA
ctgggtgcacacagcaaagcctctttggaggctgaatggggtcccccgactctggctttcccccaggtgtacatgttcctggtgaaatggcaggatttatc

SEQ ID NO: 17698 - RNA, 101 nt, synthetic construct
  source 1..101: mol_type = other RNA
ctgggtgcacacagcaaagcctctttggaggctgaatggggtcccccgactctggctttcccccaggtgtacatgttcctggtgaaatggcaggatctgtc

SEQ ID NO: 17699 - RNA, 101 nt, synthetic construct
  source 1..101: mol_type = other RNA
ctgggtgcacacagcaaagcctctttggaggctgaatggggtcccccgactctggctttcccccaggtctacatgttcctggtgaaatggcaggatttgtc

SEQ ID NO: 17700 - RNA, 101 nt, synthetic construct
  source 1..101: mol_type = other RNA
ctgggtgcacacagcaaagcctctttggaggctgaatggggtcccccgactctggctttcccccaggtgtacatgttcctggtgaaatggcaggacttatc

SEQ ID NO: 17701 - RNA, 101 nt, synthetic construct
  source 1..101: mol_type = other RNA
ctgggtgcacacagcaaagcctctttggaggctgaatggggtcccccgactctggctttcccccaggtctacatgttcctggtgaaatggcaggacttatc

SEQ ID NO: 17702 - RNA, 101 nt, synthetic construct
  source 1..101: mol_type = other RNA
ctgggtgcacacagcaaagcctctttggaggctgaatggggtcccccgactctggctttcccccaggtgtacatgttcctggtgaaatggcaggacctgtc

SEQ ID NO: 17703 - RNA, 101 nt, synthetic construct
  source 1..101: mol_type = other RNA
ctgggtgcacacagcaaagcctctttggaggctgaatggggtcccccgactctggctttcccccaggtatacatgttcctggtgaaatggcaggatttatc

SEQ ID NO: 17704 - RNA, 101 nt, synthetic construct
  source 1..101: mol_type = other RNA
ctgggtgcacacagcaaagcctctttggaggctgaatggggtcccccgactctggctttcccccaggtatacatgttcctggtgaaatggcaggatttgtc

SEQ ID NO: 17705 - RNA, 101 nt, synthetic construct
  source 1..101: mol_type = other RNA
ctgggtgcacacagcaaagcctctttggaggctgaatggggtcccccgactctggctttcccccaggtatacatgttcctggtgaaatggcaggatctgtc

SEQ ID NO: 17706 - RNA, 101 nt, synthetic construct
  source 1..101: mol_type = other RNA
ctgggtgcacacagcaaagcctctttggaggctgaatggggtcccccgactctggctttcccccaggtctacatgttcctggtgaaatggcaggacttgtc

SEQ ID NO: 17707 - RNA, 101 nt, synthetic construct
  source 1..101: mol_type = other RNA
ctgggtgcacacagcaaagcctctttggaggctgaatggggtcccccgactctggctttcccccaggtctacatgttcctggtgaaatggcaggatctgtc

SEQ ID NO: 17708 - RNA, 101 nt, synthetic construct
  source 1..101: mol_type = other RNA
ctgggtgcacacagcaaagcctctttggaggctgaatggggtcccccgactctggctttcccccaggtctacatgttcctggtgaaatggcaggatttatc

SEQ ID NO: 17709 - RNA, 101 nt, synthetic construct
  source 1..101: mol_type = other RNA
ctgggtgcacacagcaaagcctctttggaggctgaatggggtcccccgactctggctttcccccaggtatacatgttcctggtgaaatggcaggacctgtc

SEQ ID NO: 17710 - RNA, 102 nt, synthetic construct
  source 1..102: mol_type = other RNA
cctgggtgcacacagcaaagcctctttggaggctgaatggggtcccccgactctggctttcccccaggtttacatgttcctggtgaaatggcaggatttgtc

SEQ ID NO: 17711 - RNA, 102 nt, synthetic construct
  source 1..102: mol_type = other RNA
cctgggtgcacacagcaaagcctctttggaggctgaatggggtcccccgactctggctttcccccaggtttacatgttcctggtgaaatggcaggacctgtc

SEQ ID NO: 17712 - RNA, 102 nt, synthetic construct
  source 1..102: mol_type = other RNA
cctgggtgcacacagcaaagcctctttggaggctgaatggggtcccccgactctggctttcccccaggtgtacatgttcctggtgaaatggcaggatttgtc

SEQ ID NO: 17713 - RNA, 102 nt, synthetic construct
  source 1..102: mol_type = other RNA
cctgggtgcacacagcaaagcctctttggaggctgaatggggtcccccgactctggctttcccccaggtgtacatgttcctggtgaaatggcaggatttatc

SEQ ID NO: 17714 - RNA, 102 nt, synthetic construct
  source 1..102: mol_type = other RNA
cctgggtgcacacagcaaagcctctttggaggctgaatggggtcccccgactctggctttcccccaggtctacatgttcctggtgaaatggcaggatttgtc

SEQ ID NO: 17715 - RNA, 102 nt, synthetic construct
  source 1..102: mol_type = other RNA
cctgggtgcacacagcaaagcctctttggaggctgaatggggtcccccgactctggctttcccccaggtttacatgttcctggtgaaatggcaggacttatc

SEQ ID NO: 17716 - RNA, 102 nt, synthetic construct
  source 1..102: mol_type = other RNA
cctgggtgcacacagcaaagcctctttggaggctgaatggggtcccccgactctggctttcccccaggtatacatgttcctggtgaaatggcaggatctgtc

SEQ ID NO: 17717 - RNA, 102 nt, synthetic construct
  source 1..102: mol_type = other RNA
cctgggtgcacacagcaaagcctctttggaggctgaatggggtcccccgactctggctttcccccaggtatacatgttcctggtgaaatggcaggatttgtc

SEQ ID NO: 17718 - RNA, 102 nt, synthetic construct
  source 1..102: mol_type = other RNA
cctgggtgcacacagcaaagcctctttggaggctgaatggggtcccccgactctggctttcccccaggtctacatgttcctggtgaaatggcaggatttatc

SEQ ID NO: 17719 - RNA, 102 nt, synthetic construct
  source 1..102: mol_type = other RNA
cctgggtgcacacagcaaagcctctttggaggctgaatggggtcccccgactctggctttcccccaggtgtacatgttcctggtgaaatggcaggacctgtc

SEQ ID NO: 17720 - RNA, 102 nt, synthetic construct
  source 1..102: mol_type = other RNA
cctgggtgcacacagcaaagcctctttggaggctgaatggggtcccccgactctggctttcccccaggtatacatgttcctggtgaaatggcaggacttatc

SEQ ID NO: 17721 - RNA, 102 nt, synthetic construct
  source 1..102: mol_type = other RNA
cctgggtgcacacagcaaagcctctttggaggctgaatggggtcccccgactctggctttcccccaggtatacatgttcctggtgaaatggcaggacttgtc

SEQ ID NO: 17722 - RNA, 102 nt, synthetic construct
  source 1..102: mol_type = other RNA
cctgggtgcacacagcaaagcctctttggaggctgaatggggtcccccgactctggctttcccccaggtatacatgttcctggtgaaatggcaggatttatc

SEQ ID NO: 17723 - RNA, 102 nt, synthetic construct
  source 1..102: mol_type = other RNA
cctgggtgcacacagcaaagcctctttggaggctgaatggggtcccccgactctggctttcccccaggtatacatgttcctggtgaaatggcaggacctgtc

SEQ ID NO: 17724 - RNA, 102 nt, synthetic construct
  source 1..102: mol_type = other RNA
cctgggtgcacacagcaaagcctctttggaggctgaatggggtcccccgactctggctttcccccaggtctacatgttcctggtgaaatggcaggacctgtc

SEQ ID NO: 17725 - RNA, 102 nt, synthetic construct
  source 1..102: mol_type = other RNA
cctgggtgcacacagcaaagcctctttggaggctgaatggggtcccccgactctggctttcccccaggtctacatgttcctggtgaaatggcaggacttatc

SEQ ID NO: 17726 - RNA, 102 nt, synthetic construct
  source 1..102: mol_type = other RNA
cctgggtgcacacagcaaagcctctttggaggctgaatggggtcccccgactctggctttcccccaggtctacatgttcctggtgaaatggcaggacttgtc

SEQ ID NO: 17727 - RNA, 102 nt, synthetic construct
  source 1..102: mol_type = other RNA
cctgggtgcacacagcaaagcctctttggaggctgaatggggtcccccgactctggctttcccccaggtgtacatgttcctggtgaaatggcaggacttgtc

SEQ ID NO: 17728 - RNA, 102 nt, synthetic construct
  source 1..102: mol_type = other RNA
cctgggtgcacacagcaaagcctctttggaggctgaatggggtcccccgactctggctttcccccaggtctacatgttcctggtgaaatggcaggatctgtc

SEQ ID NO: 17729 - RNA, 102 nt, synthetic construct
  source 1..102: mol_type = other RNA
cctgggtgcacacagcaaagcctctttggaggctgaatggggtcccccgactctggctttcccccaggtgtacatgttcctggtgaaatggcaggatctgtc

SEQ ID NO: 17730 - RNA, 102 nt, synthetic construct
  source 1..102: mol_type = other RNA
cctgggtgcacacagcaaagcctctttggaggctgaatggggtcccccgactctggctttcccccaggtttacatgttcctggtgaaatggcaggatctgtc

SEQ ID NO: 17731 - RNA, 102 nt, synthetic construct
  source 1..102: mol_type = other RNA
cctgggtgcacacagcaaagcctctttggaggctgaatggggtcccccgactctggctttcccccaggtgtacatgttcctggtgaaatggcaggacttatc

SEQ ID NO: 17732 - RNA, 102 nt, synthetic construct
  source 1..102: mol_type = other RNA
cctgggtgcacacagcaaagcctctttggaggctgaatggggtcccccgactctggctttcccccaggtttacatgttcctggtgaaatggcaggacttgtc

SEQ ID NO: 17733 - RNA, 102 nt, synthetic construct
  source 1..102: mol_type = other RNA
cctgggtgcacacagcaaagcctctttggaggctgaatggggtcccccgactctggctttcccccaggtttacatgttcctggtgaaatggcaggatttatc

SEQ ID NO: 17734 - RNA, 103 nt, synthetic construct
  source 1..103: mol_type = other RNA
tcctgggtgcacacagcaaagcctctttggaggctgaatggggtcccccgactctggctttcccccaggtttacatgttcctggtgaaatggcaggatctgtc

SEQ ID NO: 17735 - RNA, 103 nt, synthetic construct
  source 1..103: mol_type = other RNA
tcctgggtgcacacagcaaagcctctttggaggctgaatggggtcccccgactctggctttcccccaggtttacatgttcctggtgaaatggcaggacttgtc

SEQ ID NO: 17736 - RNA, 103 nt, synthetic construct
  source 1..103: mol_type = other RNA
tcctgggtgcacacagcaaagcctctttggaggctgaatggggtcccccgactctggctttcccccaggtttacatgttcctggtgaaatggcaggacttatc

SEQ ID NO: 17737 - RNA, 103 nt, synthetic construct
  source 1..103: mol_type = other RNA
tcctgggtgcacacagcaaagcctctttggaggctgaatggggtcccccgactctggctttcccccaggtttacatgttcctggtgaaatggcaggatttgtc

SEQ ID NO: 17738 - RNA, 103 nt, synthetic construct
  source 1..103: mol_type = other RNA
tcctgggtgcacacagcaaagcctctttggaggctgaatggggtcccccgactctggctttcccccaggtctacatgttcctggtgaaatggcaggatttatc

SEQ ID NO: 17739 - RNA, 103 nt, synthetic construct
  source 1..103: mol_type = other RNA
tcctgggtgcacacagcaaagcctctttggaggctgaatggggtcccccgactctggctttcccccaggtatacatgttcctggtgaaatggcaggacctgtc

SEQ ID NO: 17740 - RNA, 103 nt, synthetic construct
  source 1..103: mol_type = other RNA
tcctgggtgcacacagcaaagcctctttggaggctgaatggggtcccccgactctggctttcccccaggtatacatgttcctggtgaaatggcaggacttatc

SEQ ID NO: 17741 - RNA, 103 nt, synthetic construct
  source 1..103: mol_type = other RNA
tcctgggtgcacacagcaaagcctctttggaggctgaatggggtcccccgactctggctttcccccaggtatacatgttcctggtgaaatggcaggacttgtc

SEQ ID NO: 17742 - RNA, 103 nt, synthetic construct
  source 1..103: mol_type = other RNA
tcctgggtgcacacagcaaagcctctttggaggctgaatggggtcccccgactctggctttcccccaggtatacatgttcctggtgaaatggcaggatctgtc

SEQ ID NO: 17743 - RNA, 103 nt, synthetic construct
  source 1..103: mol_type = other RNA
tcctgggtgcacacagcaaagcctctttggaggctgaatggggtcccccgactctggctttcccccaggtatacatgttcctggtgaaatggcaggatttatc

SEQ ID NO: 17744 - RNA, 103 nt, synthetic construct
  source 1..103: mol_type = other RNA
tcctgggtgcacacagcaaagcctctttggaggctgaatggggtcccccgactctggctttcccccaggtttacatgttcctggtgaaatggcaggacctgtc

SEQ ID NO: 17745 - RNA, 103 nt, synthetic construct
  source 1..103: mol_type = other RNA
tcctgggtgcacacagcaaagcctctttggaggctgaatggggtcccccgactctggctttcccccaggtctacatgttcctggtgaaatggcaggacctgtc

SEQ ID NO: 17746 - RNA, 103 nt, synthetic construct
  source 1..103: mol_type = other RNA
tcctgggtgcacacagcaaagcctctttggaggctgaatggggtcccccgactctggctttcccccaggtctacatgttcctggtgaaatggcaggacttgtc

SEQ ID NO: 17747 - RNA, 103 nt, synthetic construct
  source 1..103: mol_type = other RNA
tcctgggtgcacacagcaaagcctctttggaggctgaatggggtcccccgactctggctttcccccaggtctacatgttcctggtgaaatggcaggatctgtc

SEQ ID NO: 17748 - RNA, 103 nt, synthetic construct
  source 1..103: mol_type = other RNA
tcctgggtgcacacagcaaagcctctttggaggctgaatggggtcccccgactctggctttcccccaggtttacatgttcctggtgaaatggcaggatttatc

SEQ ID NO: 17749 - RNA, 103 nt, synthetic construct
  source 1..103: mol_type = other RNA
tcctgggtgcacacagcaaagcctctttggaggctgaatggggtcccccgactctggctttcccccaggtctacatgttcctggtgaaatggcaggatttgtc

SEQ ID NO: 17750 - RNA, 103 nt, synthetic construct
  source 1..103: mol_type = other RNA
tcctgggtgcacacagcaaagcctctttggaggctgaatggggtcccccgactctggctttcccccaggtgtacatgttcctggtgaaatggcaggacctgtc

SEQ ID NO: 17751 - RNA, 103 nt, synthetic construct
  source 1..103: mol_type = other RNA
tcctgggtgcacacagcaaagcctctttggaggctgaatggggtcccccgactctggctttcccccaggtgtacatgttcctggtgaaatggcaggacttatc

SEQ ID NO: 17752 - RNA, 103 nt, synthetic construct
  source 1..103: mol_type = other RNA
tcctgggtgcacacagcaaagcctctttggaggctgaatggggtcccccgactctggctttcccccaggtgtacatgttcctggtgaaatggcaggacttgtc

SEQ ID NO: 17753 - RNA, 103 nt, synthetic construct
  source 1..103: mol_type = other RNA
tcctgggtgcacacagcaaagcctctttggaggctgaatggggtcccccgactctggctttcccccaggtgtacatgttcctggtgaaatggcaggatctgtc

SEQ ID NO: 17754 - RNA, 103 nt, synthetic construct
  source 1..103: mol_type = other RNA
tcctgggtgcacacagcaaagcctctttggaggctgaatggggtcccccgactctggctttcccccaggtgtacatgttcctggtgaaatggcaggatttatc

SEQ ID NO: 17755 - RNA, 103 nt, synthetic construct
  source 1..103: mol_type = other RNA
tcctgggtgcacacagcaaagcctctttggaggctgaatggggtcccccgactctggctttcccccaggtctacatgttcctggtgaaatggcaggacttatc

SEQ ID NO: 17756 - RNA, 103 nt, synthetic construct
  source 1..103: mol_type = other RNA
tcctgggtgcacacagcaaagcctctttggaggctgaatggggtcccccgactctggctttcccccaggtatacatgttcctggtgaaatggcaggatttgtc

SEQ ID NO: 17757 - RNA, 103 nt, synthetic construct
  source 1..103: mol_type = other RNA
tcctgggtgcacacagcaaagcctctttggaggctgaatggggtcccccgactctggctttcccccaggtgtacatgttcctggtgaaatggcaggatttgtc

SEQ ID NO: 17758 - RNA, 20 nt, synthetic construct
  source 1..20: mol_type = other RNA
gaaatggcaggacttgtcgg

SEQ ID NO: 17759 - RNA, 20 nt, synthetic construct
  source 1..20: mol_type = other RNA
gtgaaatggcaggacttgtc

SEQ ID NO: 17760 - RNA, 20 nt, synthetic construct
  source 1..20: mol_type = other RNA
ggtgaaatggcaggacttat

SEQ ID NO: 17761 - RNA, 20 nt, synthetic construct
  source 1..20: mol_type = other RNA
ggtgaaatggcaggacttgt

SEQ ID NO: 17762 - RNA, 20 nt, synthetic construct
  source 1..20: mol_type = other RNA
ggtgaaatggcaggatctgt

SEQ ID NO: 17763 - RNA, 20 nt, synthetic construct
  source 1..20: mol_type = other RNA
ggtgaaatggcaggatttat

SEQ ID NO: 17764 - RNA, 20 nt, synthetic construct
  source 1..20: mol_type = other RNA
ggtgaaatggcaggatttgt

SEQ ID NO: 17765 - RNA, 20 nt, synthetic construct
  source 1..20: mol_type = other RNA
gtgaaatggcaggacttatc

SEQ ID NO: 17766 - RNA, 20 nt, synthetic construct
  source 1..20: mol_type = other RNA
gaaatggcaggacttatcgg

SEQ ID NO: 17767 - RNA, 20 nt, synthetic construct
  source 1..20: mol_type = other RNA
cctggtgaaatggcaggact

SEQ ID NO: 17768 - RNA, 16 nt, synthetic construct
  source 1..16: mol_type = other RNA
tcctccagtgggtagt

SEQ ID NO: 17769 - RNA, 17 nt, synthetic construct
  source 1..17: mol_type = other RNA
ttcctccagtgggtagt

SEQ ID NO: 17770 - RNA, 18 nt, synthetic construct
  source 1..18: mol_type = other RNA
cttcctccagtgggtagt

SEQ ID NO: 17771 - RNA, 19 nt, synthetic construct
  source 1..19: mol_type = other RNA
gcttcctccagtgggtagt

SEQ ID NO: 17772 - RNA, 20 nt, synthetic construct
  source 1..20: mol_type = other RNA
ggcttcctccagtgggtagt

SEQ ID NO: 17773 - RNA, 21 nt, synthetic construct
  source 1..21: mol_type = other RNA
gggcttcctccagtgggtagt

SEQ ID NO: 17774 - RNA, 22 nt, synthetic construct
  source 1..22: mol_type = other RNA
tgggcttcctccagtgggtagt

SEQ ID NO: 17775-17781 - skipped (7 entries)

SEQ ID NO: 17782 - RNA, 10 nt, synthetic construct
  source 1..10: mol_type = other RNA
acccactgga

SEQ ID NO: 17783 - RNA, 11 nt, synthetic construct
  source 1..11: mol_type = other RNA
acccactggag

SEQ ID NO: 17784 - RNA, 12 nt, synthetic construct
  source 1..12: mol_type = other RNA
acccactggagg

SEQ ID NO: 17785 - RNA, 13 nt, synthetic construct
  source 1..13: mol_type = other RNA
acccactggagga

SEQ ID NO: 17786 - RNA, 14 nt, synthetic construct
  source 1..14: mol_type = other RNA
acccactggaggaa

SEQ ID NO: 17787 - RNA, 15 nt, synthetic construct
  source 1..15: mol_type = other RNA
acccactggaggaag

SEQ ID NO: 17788 - RNA, 16 nt, synthetic construct
  source 1..16: mol_type = other RNA
acccactggaggaagc

SEQ ID NO: 17789 - RNA, 17 nt, synthetic construct
  source 1..17: mol_type = other RNA
acccactggaggaagcc

SEQ ID NO: 17790 - RNA, 18 nt, synthetic construct
  source 1..18: mol_type = other RNA
acccactggaggaagccc

SEQ ID NO: 17791 - RNA, 19 nt, synthetic construct
  source 1..19: mol_type = other RNA
acccactggaggaagccca

SEQ ID NO: 17792 - RNA, 77 nt, synthetic construct
  source 1..77: mol_type = other RNA
acctgggggaaagccagagtcgggggaccccattcagcctccaaagaggctttgctgtgtgcacccaggatcccact

SEQ ID NO: 17793 - RNA, 78 nt, synthetic construct
  source 1..78: mol_type = other RNA
gacctgggggaaagccagagtcgggggaccccattcagcctccaaagaggctttgctgtgtgcacccaggatcccact

SEQ ID NO: 17794 - RNA, 78 nt, synthetic construct
  source 1..78: mol_type = other RNA
cacctgggggaaagccagagtcgggggaccccattcagcctccaaagaggctttgctgtgtgcacccaggatcccact

SEQ ID NO: 17795 - RNA, 78 nt, synthetic construct
  source 1..78: mol_type = other RNA
aacctgggggaaagccagagtcgggggaccccattcagcctccaaagaggctttgctgtgtgcacccaggatcccact

SEQ ID NO: 17796 - RNA, 78 nt, synthetic construct
  source 1..78: mol_type = other RNA
tacctgggggaaagccagagtcgggggaccccattcagcctccaaagaggctttgctgtgtgcacccaggatcccact

SEQ ID NO: 17797 - RNA, 79 nt, synthetic construct
  source 1..79: mol_type = other RNA
agacctgggggaaagccagagtcgggggaccccattcagcctccaaagaggctttgctgtgtgcacccaggatcccact

SEQ ID NO: 17798 - RNA, 79 nt, synthetic construct
  source 1..79: mol_type = other RNA
atacctgggggaaagccagagtcgggggaccccattcagcctccaaagaggctttgctgtgtgcacccaggatcccact

SEQ ID NO: 17799 - RNA, 79 nt, synthetic construct
  source 1..79: mol_type = other RNA
acacctgggggaaagccagagtcgggggaccccattcagcctccaaagaggctttgctgtgtgcacccaggatcccact

SEQ ID NO: 17800 - RNA, 79 nt, synthetic construct
  source 1..79: mol_type = other RNA
aaacctgggggaaagccagagtcgggggaccccattcagcctccaaagaggctttgctgtgtgcacccaggatcccact

SEQ ID NO: 17801 - RNA, 80 nt, synthetic construct
  source 1..80: mol_type = other RNA
tagacctgggggaaagccagagtcgggggaccccattcagcctccaaagaggctttgctgtgtgcacccaggatcccact

SEQ ID NO: 17802 - RNA, 80 nt, synthetic construct
  source 1..80: mol_type = other RNA
tacacctgggggaaagccagagtcgggggaccccattcagcctccaaagaggctttgctgtgtgcacccaggatcccact

SEQ ID NO: 17803 - RNA, 80 nt, synthetic construct
  source 1..80: mol_type = other RNA
taaacctgggggaaagccagagtcgggggaccccattcagcctccaaagaggctttgctgtgtgcacccaggatcccact

SEQ ID NO: 17804 - RNA, 80 nt, synthetic construct
  source 1..80: mol_type = other RNA
tatacctgggggaaagccagagtcgggggaccccattcagcctccaaagaggctttgctgtgtgcacccaggatcccact

SEQ ID NO: 17805 - RNA, 81 nt, synthetic construct
  source 1..81: mol_type = other RNA
gtatacctgggggaaagccagagtcgggggaccccattcagcctccaaagaggctttgctgtgtgcacccaggatcccact

SEQ ID NO: 17806 - RNA, 81 nt, synthetic construct
  source 1..81: mol_type = other RNA
gtagacctgggggaaagccagagtcgggggaccccattcagcctccaaagaggctttgctgtgtgcacccaggatcccact

SEQ ID NO: 17807 - RNA, 81 nt, synthetic construct
  source 1..81: mol_type = other RNA
gtacacctgggggaaagccagagtcgggggaccccattcagcctccaaagaggctttgctgtgtgcacccaggatcccact

SEQ ID NO: 17808 - RNA, 81 nt, synthetic construct
  source 1..81: mol_type = other RNA
gtaaacctgggggaaagccagagtcgggggaccccattcagcctccaaagaggctttgctgtgtgcacccaggatcccact

SEQ ID NO: 17809 - RNA, 82 nt, synthetic construct
  source 1..82: mol_type = other RNA
tgtacacctgggggaaagccagagtcgggggaccccattcagcctccaaagaggctttgctgtgtgcacccaggatcccact

SEQ ID NO: 17810 - RNA, 82 nt, synthetic construct
  source 1..82: mol_type = other RNA
tgtagacctgggggaaagccagagtcgggggaccccattcagcctccaaagaggctttgctgtgtgcacccaggatcccact

SEQ ID NO: 17811 - RNA, 82 nt, synthetic construct
  source 1..82: mol_type = other RNA
tgtaaacctgggggaaagccagagtcgggggaccccattcagcctccaaagaggctttgctgtgtgcacccaggatcccact

SEQ ID NO: 17812 - RNA, 82 nt, synthetic construct
  source 1..82: mol_type = other RNA
tgtatacctgggggaaagccagagtcgggggaccccattcagcctccaaagaggctttgctgtgtgcacccaggatcccact

SEQ ID NO: 17813 - RNA, 83 nt, synthetic construct
  source 1..83: mol_type = other RNA
atgtacacctgggggaaagccagagtcgggggaccccattcagcctccaaagaggctttgctgtgtgcacccaggatcccact

SEQ ID NO: 17814 - RNA, 83 nt, synthetic construct
  source 1..83: mol_type = other RNA
atgtaaacctgggggaaagccagagtcgggggaccccattcagcctccaaagaggctttgctgtgtgcacccaggatcccact

SEQ ID NO: 17815 - RNA, 83 nt, synthetic construct
  source 1..83: mol_type = other RNA
atgtagacctgggggaaagccagagtcgggggaccccattcagcctccaaagaggctttgctgtgtgcacccaggatcccact

SEQ ID NO: 17816 - RNA, 83 nt, synthetic construct
  source 1..83: mol_type = other RNA
atgtatacctgggggaaagccagagtcgggggaccccattcagcctccaaagaggctttgctgtgtgcacccaggatcccact

SEQ ID NO: 17817 - RNA, 84 nt, synthetic construct
  source 1..84: mol_type = other RNA
catgtagacctgggggaaagccagagtcgggggaccccattcagcctccaaagaggctttgctgtgtgcacccaggatcccact

SEQ ID NO: 17818 - RNA, 84 nt, synthetic construct
  source 1..84: mol_type = other RNA
catgtaaacctgggggaaagccagagtcgggggaccccattcagcctccaaagaggctttgctgtgtgcacccaggatcccact

SEQ ID NO: 17819 - RNA, 84 nt, synthetic construct
  source 1..84: mol_type = other RNA
catgtatacctgggggaaagccagagtcgggggaccccattcagcctccaaagaggctttgctgtgtgcacccaggatcccact

SEQ ID NO: 17820 - RNA, 84 nt, synthetic construct
  source 1..84: mol_type = other RNA
catgtacacctgggggaaagccagagtcgggggaccccattcagcctccaaagaggctttgctgtgtgcacccaggatcccact

SEQ ID NO: 17821 - RNA, 85 nt, synthetic construct
  source 1..85: mol_type = other RNA
acatgtatacctgggggaaagccagagtcgggggaccccattcagcctccaaagaggctttgctgtgtgcacccaggatcccact

SEQ ID NO: 17822 - RNA, 85 nt, synthetic construct
  source 1..85: mol_type = other RNA
acatgtaaacctgggggaaagccagagtcgggggaccccattcagcctccaaagaggctttgctgtgtgcacccaggatcccact

SEQ ID NO: 17823 - RNA, 85 nt, synthetic construct
  source 1..85: mol_type = other RNA
acatgtagacctgggggaaagccagagtcgggggaccccattcagcctccaaagaggctttgctgtgtgcacccaggatcccact

SEQ ID NO: 17824 - RNA, 85 nt, synthetic construct
  source 1..85: mol_type = other RNA
acatgtacacctgggggaaagccagagtcgggggaccccattcagcctccaaagaggctttgctgtgtgcacccaggatcccact

SEQ ID NO: 17825 - RNA, 86 nt, synthetic construct
  source 1..86: mol_type = other RNA
aacatgtatacctgggggaaagccagagtcgggggaccccattcagcctccaaagaggctttgctgtgtgcacccaggatcccact

SEQ ID NO: 17826 - RNA, 86 nt, synthetic construct
  source 1..86: mol_type = other RNA
aacatgtagacctgggggaaagccagagtcgggggaccccattcagcctccaaagaggctttgctgtgtgcacccaggatcccact

SEQ ID NO: 17827 - RNA, 86 nt, synthetic construct
  source 1..86: mol_type = other RNA
aacatgtaaacctgggggaaagccagagtcgggggaccccattcagcctccaaagaggctttgctgtgtgcacccaggatcccact

SEQ ID NO: 17828 - RNA, 86 nt, synthetic construct
  source 1..86: mol_type = other RNA
aacatgtacacctgggggaaagccagagtcgggggaccccattcagcctccaaagaggctttgctgtgtgcacccaggatcccact

SEQ ID NO: 17829 - RNA, 87 nt, synthetic construct
  source 1..87: mol_type = other RNA
gaacatgtatacctgggggaaagccagagtcgggggaccccattcagcctccaaagaggctttgctgtgtgcacccaggatcccact

SEQ ID NO: 17830 - RNA, 87 nt, synthetic construct
  source 1..87: mol_type = other RNA
gaacatgtaaacctgggggaaagccagagtcgggggaccccattcagcctccaaagaggctttgctgtgtgcacccaggatcccact

SEQ ID NO: 17831 - RNA, 87 nt, synthetic construct
  source 1..87: mol_type = other RNA
gaacatgtagacctgggggaaagccagagtcgggggaccccattcagcctccaaagaggctttgctgtgtgcacccaggatcccact

SEQ ID NO: 17832 - RNA, 87 nt, synthetic construct
  source 1..87: mol_type = other RNA
gaacatgtacacctgggggaaagccagagtcgggggaccccattcagcctccaaagaggctttgctgtgtgcacccaggatcccact

SEQ ID NO: 17833 - RNA, 88 nt, synthetic construct
  source 1..88: mol_type = other RNA
ggaacatgtagacctgggggaaagccagagtcgggggaccccattcagcctccaaagaggctttgctgtgtgcacccaggatcccact

SEQ ID NO: 17834 - RNA, 88 nt, synthetic construct
  source 1..88: mol_type = other RNA
ggaacatgtatacctgggggaaagccagagtcgggggaccccattcagcctccaaagaggctttgctgtgtgcacccaggatcccact

SEQ ID NO: 17835 - RNA, 88 nt, synthetic construct
  source 1..88: mol_type = other RNA
ggaacatgtaaacctgggggaaagccagagtcgggggaccccattcagcctccaaagaggctttgctgtgtgcacccaggatcccact

SEQ ID NO: 17836 - RNA, 88 nt, synthetic construct
  source 1..88: mol_type = other RNA
ggaacatgtacacctgggggaaagccagagtcgggggaccccattcagcctccaaagaggctttgctgtgtgcacccaggatcccact

SEQ ID NO: 17837 - RNA, 89 nt, synthetic construct
  source 1..89: mol_type = other RNA
aggaacatgtaaacctgggggaaagccagagtcgggggaccccattcagcctccaaagaggctttgctgtgtgcacccaggatcccact

SEQ ID NO: 17838 - RNA, 89 nt, synthetic construct
  source 1..89: mol_type = other RNA
aggaacatgtagacctgggggaaagccagagtcgggggaccccattcagcctccaaagaggctttgctgtgtgcacccaggatcccact

SEQ ID NO: 17839 - RNA, 89 nt, synthetic construct
  source 1..89: mol_type = other RNA
aggaacatgtacacctgggggaaagccagagtcgggggaccccattcagcctccaaagaggctttgctgtgtgcacccaggatcccact

SEQ ID NO: 17840 - RNA, 89 nt, synthetic construct
  source 1..89: mol_type = other RNA
aggaacatgtatacctgggggaaagccagagtcgggggaccccattcagcctccaaagaggctttgctgtgtgcacccaggatcccact

SEQ ID NO: 17841 - RNA, 90 nt, synthetic construct
  source 1..90: mol_type = other RNA
caggaacatgtagacctgggggaaagccagagtcgggggaccccattcagcctccaaagaggctttgctgtgtgcacccaggatcccact

SEQ ID NO: 17842 - RNA, 90 nt, synthetic construct
  source 1..90: mol_type = other RNA
caggaacatgtacacctgggggaaagccagagtcgggggaccccattcagcctccaaagaggctttgctgtgtgcacccaggatcccact

SEQ ID NO: 17843 - RNA, 90 nt, synthetic construct
  source 1..90: mol_type = other RNA
caggaacatgtaaacctgggggaaagccagagtcgggggaccccattcagcctccaaagaggctttgctgtgtgcacccaggatcccact

SEQ ID NO: 17844 - RNA, 90 nt, synthetic construct
  source 1..90: mol_type = other RNA
caggaacatgtatacctgggggaaagccagagtcgggggaccccattcagcctccaaagaggctttgctgtgtgcacccaggatcccact

SEQ ID NO: 17845 - RNA, 91 nt, synthetic construct
  source 1..91: mol_type = other RNA
ccaggaacatgtagacctgggggaaagccagagtcgggggaccccattcagcctccaaagaggctttgctgtgtgcacccaggatcccact

SEQ ID NO: 17846 - RNA, 91 nt, synthetic construct
  source 1..91: mol_type = other RNA
ccaggaacatgtaaacctgggggaaagccagagtcgggggaccccattcagcctccaaagaggctttgctgtgtgcacccaggatcccact

SEQ ID NO: 17847 - RNA, 91 nt, synthetic construct
  source 1..91: mol_type = other RNA
ccaggaacatgtacacctgggggaaagccagagtcgggggaccccattcagcctccaaagaggctttgctgtgtgcacccaggatcccact

SEQ ID NO: 17848 - RNA, 91 nt, synthetic construct
  source 1..91: mol_type = other RNA
ccaggaacatgtatacctgggggaaagccagagtcgggggaccccattcagcctccaaagaggctttgctgtgtgcacccaggatcccact

SEQ ID NO: 17849 - RNA, 92 nt, synthetic construct
  source 1..92: mol_type = other RNA
accaggaacatgtacacctgggggaaagccagagtcgggggaccccattcagcctccaaagaggctttgctgtgtgcacccaggatcccact

SEQ ID NO: 17850 - RNA, 92 nt, synthetic construct
  source 1..92: mol_type = other RNA
accaggaacatgtaaacctgggggaaagccagagtcgggggaccccattcagcctccaaagaggctttgctgtgtgcacccaggatcccact

SEQ ID NO: 17851 - RNA, 92 nt, synthetic construct
  source 1..92: mol_type = other RNA
accaggaacatgtagacctgggggaaagccagagtcgggggaccccattcagcctccaaagaggctttgctgtgtgcacccaggatcccact

SEQ ID NO: 17852 - RNA, 92 nt, synthetic construct
  source 1..92: mol_type = other RNA
accaggaacatgtatacctgggggaaagccagagtcgggggaccccattcagcctccaaagaggctttgctgtgtgcacccaggatcccact

SEQ ID NO: 17853 - RNA, 93 nt, synthetic construct
  source 1..93: mol_type = other RNA
caccaggaacatgtacacctgggggaaagccagagtcgggggaccccattcagcctccaaagaggctttgctgtgtgcacccaggatcccact

SEQ ID NO: 17854 - RNA, 93 nt, synthetic construct
  source 1..93: mol_type = other RNA
caccaggaacatgtaaacctgggggaaagccagagtcgggggaccccattcagcctccaaagaggctttgctgtgtgcacccaggatcccact

SEQ ID NO: 17855 - RNA, 93 nt, synthetic construct
  source 1..93: mol_type = other RNA
caccaggaacatgtagacctgggggaaagccagagtcgggggaccccattcagcctccaaagaggctttgctgtgtgcacccaggatcccact

SEQ ID NO: 17856 - RNA, 93 nt, synthetic construct
  source 1..93: mol_type = other RNA
caccaggaacatgtatacctgggggaaagccagagtcgggggaccccattcagcctccaaagaggctttgctgtgtgcacccaggatcccact

SEQ ID NO: 17857 - RNA, 94 nt, synthetic construct
  source 1..94: mol_type = other RNA
tcaccaggaacatgtaaacctgggggaaagccagagtcgggggaccccattcagcctccaaagaggctttgctgtgtgcacccaggatcccact

SEQ ID NO: 17858 - RNA, 94 nt, synthetic construct
  source 1..94: mol_type = other RNA
tcaccaggaacatgtatacctgggggaaagccagagtcgggggaccccattcagcctccaaagaggctttgctgtgtgcacccaggatcccact

SEQ ID NO: 17859 - RNA, 94 nt, synthetic construct
  source 1..94: mol_type = other RNA
tcaccaggaacatgtacacctgggggaaagccagagtcgggggaccccattcagcctccaaagaggctttgctgtgtgcacccaggatcccact

SEQ ID NO: 17860 - RNA, 94 nt, synthetic construct
  source 1..94: mol_type = other RNA
tcaccaggaacatgtagacctgggggaaagccagagtcgggggaccccattcagcctccaaagaggctttgctgtgtgcacccaggatcccact

SEQ ID NO: 17861 - RNA, 95 nt, synthetic construct
  source 1..95: mol_type = other RNA
ttcaccaggaacatgtacacctgggggaaagccagagtcgggggaccccattcagcctccaaagaggctttgctgtgtgcacccaggatcccact

SEQ ID NO: 17862 - RNA, 95 nt, synthetic construct
  source 1..95: mol_type = other RNA
ttcaccaggaacatgtatacctgggggaaagccagagtcgggggaccccattcagcctccaaagaggctttgctgtgtgcacccaggatcccact

SEQ ID NO: 17863 - RNA, 95 nt, synthetic construct
  source 1..95: mol_type = other RNA
ttcaccaggaacatgtagacctgggggaaagccagagtcgggggaccccattcagcctccaaagaggctttgctgtgtgcacccaggatcccact

SEQ ID NO: 17864 - RNA, 95 nt, synthetic construct
  source 1..95: mol_type = other RNA
ttcaccaggaacatgtaaacctgggggaaagccagagtcgggggaccccattcagcctccaaagaggctttgctgtgtgcacccaggatcccact

SEQ ID NO: 17865 - RNA, 96 nt, synthetic construct
  source 1..96: mol_type = other RNA
tttcaccaggaacatgtaaacctgggggaaagccagagtcgggggaccccattcagcctccaaagaggctttgctgtgtgcacccaggatcccact

SEQ ID NO: 17866 - RNA, 96 nt, synthetic construct
  source 1..96: mol_type = other RNA
tttcaccaggaacatgtacacctgggggaaagccagagtcgggggaccccattcagcctccaaagaggctttgctgtgtgcacccaggatcccact

SEQ ID NO: 17867 - RNA, 96 nt, synthetic construct
  source 1..96: mol_type = other RNA
tttcaccaggaacatgtagacctgggggaaagccagagtcgggggaccccattcagcctccaaagaggctttgctgtgtgcacccaggatcccact

SEQ ID NO: 17868 - RNA, 96 nt, synthetic construct
  source 1..96: mol_type = other RNA
tttcaccaggaacatgtatacctgggggaaagccagagtcgggggaccccattcagcctccaaagaggctttgctgtgtgcacccaggatcccact

SEQ ID NO: 17869 - RNA, 97 nt, synthetic construct
  source 1..97: mol_type = other RNA
atttcaccaggaacatgtatacctgggggaaagccagagtcgggggaccccattcagcctccaaagaggctttgctgtgtgcacccaggatcccact

SEQ ID NO: 17870 - RNA, 97 nt, synthetic construct
  source 1..97: mol_type = other RNA
atttcaccaggaacatgtagacctgggggaaagccagagtcgggggaccccattcagcctccaaagaggctttgctgtgtgcacccaggatcccact

SEQ ID NO: 17871 - RNA, 97 nt, synthetic construct
  source 1..97: mol_type = other RNA
atttcaccaggaacatgtacacctgggggaaagccagagtcgggggaccccattcagcctccaaagaggctttgctgtgtgcacccaggatcccact

SEQ ID NO: 17872 - RNA, 97 nt, synthetic construct
  source 1..97: mol_type = other RNA
atttcaccaggaacatgtaaacctgggggaaagccagagtcgggggaccccattcagcctccaaagaggctttgctgtgtgcacccaggatcccact

SEQ ID NO: 17873 - RNA, 98 nt, synthetic construct
  source 1..98: mol_type = other RNA
catttcaccaggaacatgtatacctgggggaaagccagagtcgggggaccccattcagcctccaaagaggctttgctgtgtgcacccaggatcccact

SEQ ID NO: 17874 - RNA, 98 nt, synthetic construct
  source 1..98: mol_type = other RNA
catttcaccaggaacatgtacacctgggggaaagccagagtcgggggaccccattcagcctccaaagaggctttgctgtgtgcacccaggatcccact

SEQ ID NO: 17875 - RNA, 98 nt, synthetic construct
  source 1..98: mol_type = other RNA
catttcaccaggaacatgtagacctgggggaaagccagagtcgggggaccccattcagcctccaaagaggctttgctgtgtgcacccaggatcccact

SEQ ID NO: 17876 - RNA, 98 nt, synthetic construct
  source 1..98: mol_type = other RNA
catttcaccaggaacatgtaaacctgggggaaagccagagtcgggggaccccattcagcctccaaagaggctttgctgtgtgcacccaggatcccact

SEQ ID NO: 17877 - RNA, 99 nt, synthetic construct
  source 1..99: mol_type = other RNA
ccatttcaccaggaacatgtatacctgggggaaagccagagtcgggggaccccattcagcctccaaagaggctttgctgtgtgcacccaggatcccact

SEQ ID NO: 17878 - RNA, 99 nt, synthetic construct
  source 1..99: mol_type = other RNA
ccatttcaccaggaacatgtacacctgggggaaagccagagtcgggggaccccattcagcctccaaagaggctttgctgtgtgcacccaggatcccact

SEQ ID NO: 17879 - RNA, 99 nt, synthetic construct
  source 1..99: mol_type = other RNA
ccatttcaccaggaacatgtagacctgggggaaagccagagtcgggggaccccattcagcctccaaagaggctttgctgtgtgcacccaggatcccact

SEQ ID NO: 17880 - RNA, 99 nt, synthetic construct
  source 1..99: mol_type = other RNA
ccatttcaccaggaacatgtaaacctgggggaaagccagagtcgggggaccccattcagcctccaaagaggctttgctgtgtgcacccaggatcccact

SEQ ID NO: 17881 - RNA, 100 nt, synthetic construct
  source 1..100: mol_type = other RNA
gccatttcaccaggaacatgtatacctgggggaaagccagagtcgggggaccccattcagcctccaaagaggctttgctgtgtgcacccaggatcccact

SEQ ID NO: 17882 - RNA, 100 nt, synthetic construct
  source 1..100: mol_type = other RNA
gccatttcaccaggaacatgtagacctgggggaaagccagagtcgggggaccccattcagcctccaaagaggctttgctgtgtgcacccaggatcccact

SEQ ID NO: 17883 - RNA, 100 nt, synthetic construct
  source 1..100: mol_type = other RNA
gccatttcaccaggaacatgtacacctgggggaaagccagagtcgggggaccccattcagcctccaaagaggctttgctgtgtgcacccaggatcccact

SEQ ID NO: 17884 - RNA, 100 nt, synthetic construct
  source 1..100: mol_type = other RNA
gccatttcaccaggaacatgtaaacctgggggaaagccagagtcgggggaccccattcagcctccaaagaggctttgctgtgtgcacccaggatcccact

SEQ ID NO: 17885 - RNA, 101 nt, synthetic construct
  source 1..101: mol_type = other RNA
tgccatttcaccaggaacatgtatacctgggggaaagccagagtcgggggaccccattcagcctccaaagaggctttgctgtgtgcacccaggatcccact

SEQ ID NO: 17886 - RNA, 101 nt, synthetic construct
  source 1..101: mol_type = other RNA
tgccatttcaccaggaacatgtacacctgggggaaagccagagtcgggggaccccattcagcctccaaagaggctttgctgtgtgcacccaggatcccact

SEQ ID NO: 17887 - RNA, 101 nt, synthetic construct
  source 1..101: mol_type = other RNA
tgccatttcaccaggaacatgtaaacctgggggaaagccagagtcgggggaccccattcagcctccaaagaggctttgctgtgtgcacccaggatcccact

SEQ ID NO: 17888 - RNA, 101 nt, synthetic construct
  source 1..101: mol_type = other RNA
tgccatttcaccaggaacatgtagacctgggggaaagccagagtcgggggaccccattcagcctccaaagaggctttgctgtgtgcacccaggatcccact

SEQ ID NO: 17889 - RNA, 102 nt, synthetic construct
  source 1..102: mol_type = other RNA
ctgccatttcaccaggaacatgtatacctgggggaaagccagagtcgggggaccccattcagcctccaaagaggctttgctgtgtgcacccaggatcccact

SEQ ID NO: 17890 - RNA, 102 nt, synthetic construct
  source 1..102: mol_type = other RNA
ctgccatttcaccaggaacatgtagacctgggggaaagccagagtcgggggaccccattcagcctccaaagaggctttgctgtgtgcacccaggatcccact

SEQ ID NO: 17891 - RNA, 102 nt, synthetic construct
  source 1..102: mol_type = other RNA
ctgccatttcaccaggaacatgtacacctgggggaaagccagagtcgggggaccccattcagcctccaaagaggctttgctgtgtgcacccaggatcccact

SEQ ID NO: 17892 - RNA, 102 nt, synthetic construct
  source 1..102: mol_type = other RNA
ctgccatttcaccaggaacatgtaaacctgggggaaagccagagtcgggggaccccattcagcctccaaagaggctttgctgtgtgcacccaggatcccact

SEQ ID NO: 17893 - RNA, 103 nt, synthetic construct
  source 1..103: mol_type = other RNA
cctgccatttcaccaggaacatgtagacctgggggaaagccagagtcgggggaccccattcagcctccaaagaggctttgctgtgtgcacccaggatcccact

SEQ ID NO: 17894 - RNA, 103 nt, synthetic construct
  source 1..103: mol_type = other RNA
cctgccatttcaccaggaacatgtatacctgggggaaagccagagtcgggggaccccattcagcctccaaagaggctttgctgtgtgcacccaggatcccact

SEQ ID NO: 17895 - RNA, 103 nt, synthetic construct
  source 1..103: mol_type = other RNA
cctgccatttcaccaggaacatgtaaacctgggggaaagccagagtcgggggaccccattcagcctccaaagaggctttgctgtgtgcacccaggatcccact

SEQ ID NO: 17896 - RNA, 103 nt, synthetic construct
  source 1..103: mol_type = other RNA
cctgccatttcaccaggaacatgtacacctgggggaaagccagagtcgggggaccccattcagcctccaaagaggctttgctgtgtgcacccaggatcccact

SEQ ID NO: 17897 - RNA, 16 nt, synthetic construct
  source 1..16: mol_type = other RNA
gatctcggtgaagcgc

SEQ ID NO: 17898 - RNA, 17 nt, synthetic construct
  source 1..17: mol_type = other RNA
agatctcggtgaagcgc

SEQ ID NO: 17899 - RNA, 18 nt, synthetic construct
  source 1..18: mol_type = other RNA
tagatctcggtgaagcgc

SEQ ID NO: 17900 - RNA, 19 nt, synthetic construct
  source 1..19: mol_type = other RNA
gtagatctcggtgaagcgc

SEQ ID NO: 17901 - RNA, 20 nt, synthetic construct
  source 1..20: mol_type = other RNA
cgtagatctcggtgaagcgc

SEQ ID NO: 17902 - RNA, 21 nt, synthetic construct
  source 1..21: mol_type = other RNA
tcgtagatctcggtgaagcgc

SEQ ID NO: 17903 - RNA, 22 nt, synthetic construct
  source 1..22: mol_type = other RNA
ctcgtagatctcggtgaagcgc

SEQ ID NO: 17904-17910 - skipped (7 entries)

SEQ ID NO: 17911 - RNA, 10 nt, synthetic construct
  source 1..10: mol_type = other RNA
cttcaccgag

SEQ ID NO: 17912 - RNA, 11 nt, synthetic construct
  source 1..11: mol_type = other RNA
cttcaccgaga

SEQ ID NO: 17913 - RNA, 12 nt, synthetic construct
  source 1..12: mol_type = other RNA
cttcaccgagat

SEQ ID NO: 17914 - RNA, 13 nt, synthetic construct
  source 1..13: mol_type = other RNA
cttcaccgagatc

SEQ ID NO: 17915 - RNA, 14 nt, synthetic construct
  source 1..14: mol_type = other RNA
cttcaccgagatct

SEQ ID NO: 17916 - RNA, 15 nt, synthetic construct
  source 1..15: mol_type = other RNA
cttcaccgagatcta

SEQ ID NO: 17917 - RNA, 16 nt, synthetic construct
  source 1..16: mol_type = other RNA
cttcaccgagatctac

SEQ ID NO: 17918 - RNA, 17 nt, synthetic construct
  source 1..17: mol_type = other RNA
cttcaccgagatctacg

SEQ ID NO: 17919 - RNA, 18 nt, synthetic construct
  source 1..18: mol_type = other RNA
cttcaccgagatctacga

SEQ ID NO: 17920 - RNA, 19 nt, synthetic construct
  source 1..19: mol_type = other RNA
cttcaccgagatctacgag

SEQ ID NO: 17921 - RNA, 56 nt, synthetic construct
  source 1..56: mol_type = other RNA
gtttacatgttcctggtgaaatggcaggacctgtcggagaaggtggtctacagacg

SEQ ID NO: 17922 - RNA, 56 nt, synthetic construct
  source 1..56: mol_type = other RNA
gtatacatgttcctggtgaaatggcaggacctgtcggagaaggtggtctacagacg

SEQ ID NO: 17923 - RNA, 56 nt, synthetic construct
  source 1..56: mol_type = other RNA
gtctacatgttcctggtgaaatggcaggacctgtcggagaaggtggtctatagacg

SEQ ID NO: 17924 - RNA, 56 nt, synthetic construct
  source 1..56: mol_type = other RNA
gtctacatgttcctggtgaaatggcaggacctgtcggagaaggtggtctataggcg

SEQ ID NO: 17925 - RNA, 56 nt, synthetic construct
  source 1..56: mol_type = other RNA
gtctacatgttcctggtgaaatggcaggacctgtcggagaaggtggtctatcggcg

SEQ ID NO: 17926 - RNA, 56 nt, synthetic construct
  source 1..56: mol_type = other RNA
gtgtacatgttcctggtgaaatggcaggacctgtcggagaaggtggtctacagacg

SEQ ID NO: 17927 - RNA, 56 nt, synthetic construct
  source 1..56: mol_type = other RNA
gtgtacatgttcctggtgaaatggcaggacctgtcggagaaggtggtctacaggcg

SEQ ID NO: 17928 - RNA, 56 nt, synthetic construct
  source 1..56: mol_type = other RNA
gtgtacatgttcctggtgaaatggcaggacctgtcggagaaggtggtctaccggcg

SEQ ID NO: 17929 - RNA, 56 nt, synthetic construct
  source 1..56: mol_type = other RNA
gtctacatgttcctggtgaaatggcaggacctgtcggagaaggtggtctacagacg

SEQ ID NO: 17930 - RNA, 56 nt, synthetic construct
  source 1..56: mol_type = other RNA
gtttacatgttcctggtgaaatggcaggacctgtcggagaaggtggtctataggcg

SEQ ID NO: 17931 - RNA, 56 nt, synthetic construct
  source 1..56: mol_type = other RNA
gtctacatgttcctggtgaaatggcaggacctgtcggagaaggtggtctacaggcg

SEQ ID NO: 17932 - RNA, 56 nt, synthetic construct
  source 1..56: mol_type = other RNA
gtatacatgttcctggtgaaatggcaggacctgtcggagaaggtggtctacaggcg

SEQ ID NO: 17933 - RNA, 56 nt, synthetic construct
  source 1..56: mol_type = other RNA
gtatacatgttcctggtgaaatggcaggacctgtcggagaaggtggtctaccggcg

SEQ ID NO: 17934 - RNA, 56 nt, synthetic construct
  source 1..56: mol_type = other RNA
gtatacatgttcctggtgaaatggcaggacctgtcggagaaggtggtctatagacg

SEQ ID NO: 17935 - RNA, 56 nt, synthetic construct
  source 1..56: mol_type = other RNA
gtctacatgttcctggtgaaatggcaggacctgtcggagaaggtggtctaccggcg

SEQ ID NO: 17936 - RNA, 56 nt, synthetic construct
  source 1..56: mol_type = other RNA
gtatacatgttcctggtgaaatggcaggacctgtcggagaaggtggtctatcggcg

SEQ ID NO: 17937 - RNA, 56 nt, synthetic construct
  source 1..56: mol_type = other RNA
gtgtacatgttcctggtgaaatggcaggacctgtcggagaaggtggtctataggcg

SEQ ID NO: 17938 - RNA, 56 nt, synthetic construct
  source 1..56: mol_type = other RNA
gtgtacatgttcctggtgaaatggcaggacctgtcggagaaggtggtctatagacg

SEQ ID NO: 17939 - RNA, 56 nt, synthetic construct
  source 1..56: mol_type = other RNA
gtttacatgttcctggtgaaatggcaggacctgtcggagaaggtggtctatcggcg

SEQ ID NO: 17940 - RNA, 56 nt, synthetic construct
  source 1..56: mol_type = other RNA
gtgtacatgttcctggtgaaatggcaggacctgtcggagaaggtggtctatcggcg

SEQ ID NO: 17941 - RNA, 56 nt, synthetic construct
  source 1..56: mol_type = other RNA
gtttacatgttcctggtgaaatggcaggacctgtcggagaaggtggtctacaggcg

SEQ ID NO: 17942 - RNA, 56 nt, synthetic construct
  source 1..56: mol_type = other RNA
gtttacatgttcctggtgaaatggcaggacctgtcggagaaggtggtctaccggcg

SEQ ID NO: 17943 - RNA, 56 nt, synthetic construct
  source 1..56: mol_type = other RNA
gtttacatgttcctggtgaaatggcaggacctgtcggagaaggtggtctatagacg

SEQ ID NO: 17944 - RNA, 56 nt, synthetic construct
  source 1..56: mol_type = other RNA
gtatacatgttcctggtgaaatggcaggacctgtcggagaaggtggtctataggcg

SEQ ID NO: 17945 - RNA, 57 nt, synthetic construct
  source 1..57: mol_type = other RNA
ggtgtacatgttcctggtgaaatggcaggacctgtcggagaaggtggtctatagacg

SEQ ID NO: 17946 - RNA, 57 nt, synthetic construct
  source 1..57: mol_type = other RNA
ggtatacatgttcctggtgaaatggcaggacctgtcggagaaggtggtctacaggcg

SEQ ID NO: 17947 - RNA, 57 nt, synthetic construct
  source 1..57: mol_type = other RNA
ggtgtacatgttcctggtgaaatggcaggacctgtcggagaaggtggtctacagacg

SEQ ID NO: 17948 - RNA, 57 nt, synthetic construct
  source 1..57: mol_type = other RNA
ggtctacatgttcctggtgaaatggcaggacctgtcggagaaggtggtctatcggcg

SEQ ID NO: 17949 - RNA, 57 nt, synthetic construct
  source 1..57: mol_type = other RNA
ggtctacatgttcctggtgaaatggcaggacctgtcggagaaggtggtctataggcg

SEQ ID NO: 17950 - RNA, 57 nt, synthetic construct
  source 1..57: mol_type = other RNA
ggtctacatgttcctggtgaaatggcaggacctgtcggagaaggtggtctatagacg

SEQ ID NO: 17951 - RNA, 57 nt, synthetic construct
  source 1..57: mol_type = other RNA
ggtctacatgttcctggtgaaatggcaggacctgtcggagaaggtggtctaccggcg

SEQ ID NO: 17952 - RNA, 57 nt, synthetic construct
  source 1..57: mol_type = other RNA
ggtatacatgttcctggtgaaatggcaggacctgtcggagaaggtggtctatcggcg

SEQ ID NO: 17953 - RNA, 57 nt, synthetic construct
  source 1..57: mol_type = other RNA
ggtctacatgttcctggtgaaatggcaggacctgtcggagaaggtggtctacagacg

SEQ ID NO: 17954 - RNA, 57 nt, synthetic construct
  source 1..57: mol_type = other RNA
ggtgtacatgttcctggtgaaatggcaggacctgtcggagaaggtggtctacaggcg

SEQ ID NO: 17955 - RNA, 57 nt, synthetic construct
  source 1..57: mol_type = other RNA
ggtatacatgttcctggtgaaatggcaggacctgtcggagaaggtggtctacagacg

SEQ ID NO: 17956 - RNA, 57 nt, synthetic construct
  source 1..57: mol_type = other RNA
ggtatacatgttcctggtgaaatggcaggacctgtcggagaaggtggtctaccggcg

SEQ ID NO: 17957 - RNA, 57 nt, synthetic construct
  source 1..57: mol_type = other RNA
ggtgtacatgttcctggtgaaatggcaggacctgtcggagaaggtggtctaccggcg

SEQ ID NO: 17958 - RNA, 57 nt, synthetic construct
  source 1..57: mol_type = other RNA
ggtctacatgttcctggtgaaatggcaggacctgtcggagaaggtggtctacaggcg

SEQ ID NO: 17959 - RNA, 57 nt, synthetic construct
  source 1..57: mol_type = other RNA
ggtttacatgttcctggtgaaatggcaggacctgtcggagaaggtggtctatagacg

SEQ ID NO: 17960 - RNA, 57 nt, synthetic construct
  source 1..57: mol_type = other RNA
ggtatacatgttcctggtgaaatggcaggacctgtcggagaaggtggtctatagacg

SEQ ID NO: 17961 - RNA, 57 nt, synthetic construct
  source 1..57: mol_type = other RNA
ggtttacatgttcctggtgaaatggcaggacctgtcggagaaggtggtctatcggcg

SEQ ID NO: 17962 - RNA, 57 nt, synthetic construct
  source 1..57: mol_type = other RNA
ggtatacatgttcctggtgaaatggcaggacctgtcggagaaggtggtctataggcg

SEQ ID NO: 17963 - RNA, 57 nt, synthetic construct
  source 1..57: mol_type = other RNA
ggtttacatgttcctggtgaaatggcaggacctgtcggagaaggtggtctacaggcg

SEQ ID NO: 17964 - RNA, 57 nt, synthetic construct
  source 1..57: mol_type = other RNA
ggtttacatgttcctggtgaaatggcaggacctgtcggagaaggtggtctacagacg

SEQ ID NO: 17965 - RNA, 57 nt, synthetic construct
  source 1..57: mol_type = other RNA
ggtgtacatgttcctggtgaaatggcaggacctgtcggagaaggtggtctatcggcg

SEQ ID NO: 17966 - RNA, 57 nt, synthetic construct
  source 1..57: mol_type = other RNA
ggtttacatgttcctggtgaaatggcaggacctgtcggagaaggtggtctaccggcg

SEQ ID NO: 17967 - RNA, 57 nt, synthetic construct
  source 1..57: mol_type = other RNA
ggtgtacatgttcctggtgaaatggcaggacctgtcggagaaggtggtctataggcg

SEQ ID NO: 17968 - RNA, 57 nt, synthetic construct
  source 1..57: mol_type = other RNA
ggtttacatgttcctggtgaaatggcaggacctgtcggagaaggtggtctataggcg

SEQ ID NO: 17969 - RNA, 58 nt, synthetic construct
  source 1..58: mol_type = other RNA
aggtgtacatgttcctggtgaaatggcaggacctgtcggagaaggtggtctacaggcg

SEQ ID NO: 17970 - RNA, 58 nt, synthetic construct
  source 1..58: mol_type = other RNA
aggtttacatgttcctggtgaaatggcaggacctgtcggagaaggtggtctaccggcg

SEQ ID NO: 17971 - RNA, 58 nt, synthetic construct
  source 1..58: mol_type = other RNA
aggtgtacatgttcctggtgaaatggcaggacctgtcggagaaggtggtctacagacg

SEQ ID NO: 17972 - RNA, 58 nt, synthetic construct
  source 1..58: mol_type = other RNA
aggtttacatgttcctggtgaaatggcaggacctgtcggagaaggtggtctataggcg

SEQ ID NO: 17973 - RNA, 58 nt, synthetic construct
  source 1..58: mol_type = other RNA
aggtttacatgttcctggtgaaatggcaggacctgtcggagaaggtggtctacagacg

SEQ ID NO: 17974 - RNA, 58 nt, synthetic construct
  source 1..58: mol_type = other RNA
aggtgtacatgttcctggtgaaatggcaggacctgtcggagaaggtggtctaccggcg

SEQ ID NO: 17975 - RNA, 58 nt, synthetic construct
  source 1..58: mol_type = other RNA
aggtttacatgttcctggtgaaatggcaggacctgtcggagaaggtggtctatagacg

SEQ ID NO: 17976 - RNA, 58 nt, synthetic construct
  source 1..58: mol_type = other RNA
aggtgtacatgttcctggtgaaatggcaggacctgtcggagaaggtggtctataggcg

SEQ ID NO: 17977 - RNA, 58 nt, synthetic construct
  source 1..58: mol_type = other RNA
aggtgtacatgttcctggtgaaatggcaggacctgtcggagaaggtggtctatcggcg

SEQ ID NO: 17978 - RNA, 58 nt, synthetic construct
  source 1..58: mol_type = other RNA
aggtgtacatgttcctggtgaaatggcaggacctgtcggagaaggtggtctatagacg

SEQ ID NO: 17979 - RNA, 58 nt, synthetic construct
  source 1..58: mol_type = other RNA
aggtatacatgttcctggtgaaatggcaggacctgtcggagaaggtggtctacagacg

SEQ ID NO: 17980 - RNA, 58 nt, synthetic construct
  source 1..58: mol_type = other RNA
aggtctacatgttcctggtgaaatggcaggacctgtcggagaaggtggtctataggcg

SEQ ID NO: 17981 - RNA, 58 nt, synthetic construct
  source 1..58: mol_type = other RNA
aggtctacatgttcctggtgaaatggcaggacctgtcggagaaggtggtctaccggcg

SEQ ID NO: 17982 - RNA, 58 nt, synthetic construct
  source 1..58: mol_type = other RNA
aggtctacatgttcctggtgaaatggcaggacctgtcggagaaggtggtctacaggcg

SEQ ID NO: 17983 - RNA, 58 nt, synthetic construct
  source 1..58: mol_type = other RNA
aggtctacatgttcctggtgaaatggcaggacctgtcggagaaggtggtctacagacg

SEQ ID NO: 17984 - RNA, 58 nt, synthetic construct
  source 1..58: mol_type = other RNA
aggtttacatgttcctggtgaaatggcaggacctgtcggagaaggtggtctatcggcg

SEQ ID NO: 17985 - RNA, 58 nt, synthetic construct
  source 1..58: mol_type = other RNA
aggtatacatgttcctggtgaaatggcaggacctgtcggagaaggtggtctatcggcg

SEQ ID NO: 17986 - RNA, 58 nt, synthetic construct
  source 1..58: mol_type = other RNA
aggtatacatgttcctggtgaaatggcaggacctgtcggagaaggtggtctataggcg

SEQ ID NO: 17987 - RNA, 58 nt, synthetic construct
  source 1..58: mol_type = other RNA
aggtatacatgttcctggtgaaatggcaggacctgtcggagaaggtggtctaccggcg

SEQ ID NO: 17988 - RNA, 58 nt, synthetic construct
  source 1..58: mol_type = other RNA
aggtatacatgttcctggtgaaatggcaggacctgtcggagaaggtggtctatagacg

SEQ ID NO: 17989 - RNA, 58 nt, synthetic construct
  source 1..58: mol_type = other RNA
aggtatacatgttcctggtgaaatggcaggacctgtcggagaaggtggtctacaggcg

SEQ ID NO: 17990 - RNA, 58 nt, synthetic construct
  source 1..58: mol_type = other RNA
aggtttacatgttcctggtgaaatggcaggacctgtcggagaaggtggtctacaggcg

SEQ ID NO: 17991 - RNA, 58 nt, synthetic construct
  source 1..58: mol_type = other RNA
aggtctacatgttcctggtgaaatggcaggacctgtcggagaaggtggtctatagacg

SEQ ID NO: 17992 - RNA, 58 nt, synthetic construct
  source 1..58: mol_type = other RNA
aggtctacatgttcctggtgaaatggcaggacctgtcggagaaggtggtctatcggcg

SEQ ID NO: 17993 - RNA, 59 nt, synthetic construct
  source 1..59: mol_type = other RNA
caggtgtacatgttcctggtgaaatggcaggacctgtcggagaaggtggtctaccggcg

SEQ ID NO: 17994 - RNA, 59 nt, synthetic construct
  source 1..59: mol_type = other RNA
caggtttacatgttcctggtgaaatggcaggacctgtcggagaaggtggtctatcggcg

SEQ ID NO: 17995 - RNA, 59 nt, synthetic construct
  source 1..59: mol_type = other RNA
caggtctacatgttcctggtgaaatggcaggacctgtcggagaaggtggtctacagacg

SEQ ID NO: 17996 - RNA, 59 nt, synthetic construct
  source 1..59: mol_type = other RNA
caggtctacatgttcctggtgaaatggcaggacctgtcggagaaggtggtctaccggcg

SEQ ID NO: 17997 - RNA, 59 nt, synthetic construct
  source 1..59: mol_type = other RNA
caggtgtacatgttcctggtgaaatggcaggacctgtcggagaaggtggtctacagacg

SEQ ID NO: 17998 - RNA, 59 nt, synthetic construct
  source 1..59: mol_type = other RNA
caggtatacatgttcctggtgaaatggcaggacctgtcggagaaggtggtctaccggcg

SEQ ID NO: 17999 - RNA, 59 nt, synthetic construct
  source 1..59: mol_type = other RNA
caggtatacatgttcctggtgaaatggcaggacctgtcggagaaggtggtctatagacg

SEQ ID NO: 18000 - RNA, 59 nt, synthetic construct
  source 1..59: mol_type = other RNA
caggtatacatgttcctggtgaaatggcaggacctgtcggagaaggtggtctataggcg

SEQ ID NO: 18001 - RNA, 59 nt, synthetic construct
  source 1..59: mol_type = other RNA
caggtatacatgttcctggtgaaatggcaggacctgtcggagaaggtggtctatcggcg

SEQ ID NO: 18002 - RNA, 59 nt, synthetic construct
  source 1..59: mol_type = other RNA
caggtttacatgttcctggtgaaatggcaggacctgtcggagaaggtggtctataggcg

SEQ ID NO: 18003 - RNA, 59 nt, synthetic construct
  source 1..59: mol_type = other RNA
caggtctacatgttcctggtgaaatggcaggacctgtcggagaaggtggtctacaggcg

SEQ ID NO: 18004 - RNA, 59 nt, synthetic construct
  source 1..59: mol_type = other RNA
caggtctacatgttcctggtgaaatggcaggacctgtcggagaaggtggtctatagacg

SEQ ID NO: 18005 - RNA, 59 nt, synthetic construct
  source 1..59: mol_type = other RNA
caggtctacatgttcctggtgaaatggcaggacctgtcggagaaggtggtctataggcg

SEQ ID NO: 18006 - RNA, 59 nt, synthetic construct
  source 1..59: mol_type = other RNA
caggtctacatgttcctggtgaaatggcaggacctgtcggagaaggtggtctatcggcg

SEQ ID NO: 18007 - RNA, 59 nt, synthetic construct
  source 1..59: mol_type = other RNA
caggtatacatgttcctggtgaaatggcaggacctgtcggagaaggtggtctacagacg

SEQ ID NO: 18008 - RNA, 59 nt, synthetic construct
  source 1..59: mol_type = other RNA
caggtgtacatgttcctggtgaaatggcaggacctgtcggagaaggtggtctacaggcg

SEQ ID NO: 18009 - RNA, 59 nt, synthetic construct
  source 1..59: mol_type = other RNA
caggtgtacatgttcctggtgaaatggcaggacctgtcggagaaggtggtctatagacg

SEQ ID NO: 18010 - RNA, 59 nt, synthetic construct
  source 1..59: mol_type = other RNA
caggtgtacatgttcctggtgaaatggcaggacctgtcggagaaggtggtctataggcg

SEQ ID NO: 18011 - RNA, 59 nt, synthetic construct
  source 1..59: mol_type = other RNA
caggtgtacatgttcctggtgaaatggcaggacctgtcggagaaggtggtctatcggcg

SEQ ID NO: 18012 - RNA, 59 nt, synthetic construct
  source 1..59: mol_type = other RNA
caggtttacatgttcctggtgaaatggcaggacctgtcggagaaggtggtctacagacg

SEQ ID NO: 18013 - RNA, 59 nt, synthetic construct
  source 1..59: mol_type = other RNA
caggtttacatgttcctggtgaaatggcaggacctgtcggagaaggtggtctacaggcg

SEQ ID NO: 18014 - RNA, 59 nt, synthetic construct
  source 1..59: mol_type = other RNA
caggtttacatgttcctggtgaaatggcaggacctgtcggagaaggtggtctaccggcg

SEQ ID NO: 18015 - RNA, 59 nt, synthetic construct
  source 1..59: mol_type = other RNA
caggtttacatgttcctggtgaaatggcaggacctgtcggagaaggtggtctatagacg

SEQ ID NO: 18016 - RNA, 59 nt, synthetic construct
  source 1..59: mol_type = other RNA
caggtatacatgttcctggtgaaatggcaggacctgtcggagaaggtggtctacaggcg

SEQ ID NO: 18017 - RNA, 60 nt, synthetic construct
  source 1..60: mol_type = other RNA
ccaggtttacatgttcctggtgaaatggcaggacctgtcggagaaggtggtctacaggcg

SEQ ID NO: 18018 - RNA, 60 nt, synthetic construct
  source 1..60: mol_type = other RNA
ccaggtttacatgttcctggtgaaatggcaggacctgtcggagaaggtggtctaccggcg

SEQ ID NO: 18019 - RNA, 60 nt, synthetic construct
  source 1..60: mol_type = other RNA
ccaggtttacatgttcctggtgaaatggcaggacctgtcggagaaggtggtctatagacg

SEQ ID NO: 18020 - RNA, 60 nt, synthetic construct
  source 1..60: mol_type = other RNA
ccaggtgtacatgttcctggtgaaatggcaggacctgtcggagaaggtggtctatcggcg

SEQ ID NO: 18021 - RNA, 60 nt, synthetic construct
  source 1..60: mol_type = other RNA
ccaggtgtacatgttcctggtgaaatggcaggacctgtcggagaaggtggtctacagacg

SEQ ID NO: 18022 - RNA, 60 nt, synthetic construct
  source 1..60: mol_type = other RNA
ccaggtttacatgttcctggtgaaatggcaggacctgtcggagaaggtggtctataggcg

SEQ ID NO: 18023 - RNA, 60 nt, synthetic construct
  source 1..60: mol_type = other RNA
ccaggtctacatgttcctggtgaaatggcaggacctgtcggagaaggtggtctaccggcg

SEQ ID NO: 18024 - RNA, 60 nt, synthetic construct
  source 1..60: mol_type = other RNA
ccaggtctacatgttcctggtgaaatggcaggacctgtcggagaaggtggtctacaggcg

SEQ ID NO: 18025 - RNA, 60 nt, synthetic construct
  source 1..60: mol_type = other RNA
ccaggtctacatgttcctggtgaaatggcaggacctgtcggagaaggtggtctacagacg

SEQ ID NO: 18026 - RNA, 60 nt, synthetic construct
  source 1..60: mol_type = other RNA
ccaggtatacatgttcctggtgaaatggcaggacctgtcggagaaggtggtctatcggcg

SEQ ID NO: 18027 - RNA, 60 nt, synthetic construct
  source 1..60: mol_type = other RNA
ccaggtatacatgttcctggtgaaatggcaggacctgtcggagaaggtggtctataggcg

SEQ ID NO: 18028 - RNA, 60 nt, synthetic construct
  source 1..60: mol_type = other RNA
ccaggtatacatgttcctggtgaaatggcaggacctgtcggagaaggtggtctatagacg

SEQ ID NO: 18029 - RNA, 60 nt, synthetic construct
  source 1..60: mol_type = other RNA
ccaggtatacatgttcctggtgaaatggcaggacctgtcggagaaggtggtctaccggcg

SEQ ID NO: 18030 - RNA, 60 nt, synthetic construct
  source 1..60: mol_type = other RNA
ccaggtatacatgttcctggtgaaatggcaggacctgtcggagaaggtggtctacaggcg

SEQ ID NO: 18031 - RNA, 60 nt, synthetic construct
  source 1..60: mol_type = other RNA
ccaggtttacatgttcctggtgaaatggcaggacctgtcggagaaggtggtctacagacg

SEQ ID NO: 18032 - RNA, 60 nt, synthetic construct
  source 1..60: mol_type = other RNA
ccaggtctacatgttcctggtgaaatggcaggacctgtcggagaaggtggtctataggcg

SEQ ID NO: 18033 - RNA, 60 nt, synthetic construct
  source 1..60: mol_type = other RNA
ccaggtctacatgttcctggtgaaatggcaggacctgtcggagaaggtggtctatagacg

SEQ ID NO: 18034 - RNA, 60 nt, synthetic construct
  source 1..60: mol_type = other RNA
ccaggtttacatgttcctggtgaaatggcaggacctgtcggagaaggtggtctatcggcg

SEQ ID NO: 18035 - RNA, 60 nt, synthetic construct
  source 1..60: mol_type = other RNA
ccaggtatacatgttcctggtgaaatggcaggacctgtcggagaaggtggtctacagacg

SEQ ID NO: 18036 - RNA, 60 nt, synthetic construct
  source 1..60: mol_type = other RNA
ccaggtctacatgttcctggtgaaatggcaggacctgtcggagaaggtggtctatcggcg

SEQ ID NO: 18037 - RNA, 60 nt, synthetic construct
  source 1..60: mol_type = other RNA
ccaggtgtacatgttcctggtgaaatggcaggacctgtcggagaaggtggtctacaggcg

SEQ ID NO: 18038 - RNA, 60 nt, synthetic construct
  source 1..60: mol_type = other RNA
ccaggtgtacatgttcctggtgaaatggcaggacctgtcggagaaggtggtctataggcg

SEQ ID NO: 18039 - RNA, 60 nt, synthetic construct
  source 1..60: mol_type = other RNA
ccaggtgtacatgttcctggtgaaatggcaggacctgtcggagaaggtggtctatagacg

SEQ ID NO: 18040 - RNA, 60 nt, synthetic construct
  source 1..60: mol_type = other RNA
ccaggtgtacatgttcctggtgaaatggcaggacctgtcggagaaggtggtctaccggcg

SEQ ID NO: 18041 - RNA, 61 nt, synthetic construct
  source 1..61: mol_type = other RNA
cccaggtttacatgttcctggtgaaatggcaggacctgtcggagaaggtggtctatagacg

SEQ ID NO: 18042 - RNA, 61 nt, synthetic construct
  source 1..61: mol_type = other RNA
cccaggtttacatgttcctggtgaaatggcaggacctgtcggagaaggtggtctataggcg

SEQ ID NO: 18043 - RNA, 61 nt, synthetic construct
  source 1..61: mol_type = other RNA
cccaggtttacatgttcctggtgaaatggcaggacctgtcggagaaggtggtctatcggcg

SEQ ID NO: 18044 - RNA, 61 nt, synthetic construct
  source 1..61: mol_type = other RNA
cccaggtttacatgttcctggtgaaatggcaggacctgtcggagaaggtggtctacagacg

SEQ ID NO: 18045 - RNA, 61 nt, synthetic construct
  source 1..61: mol_type = other RNA
cccaggtatacatgttcctggtgaaatggcaggacctgtcggagaaggtggtctaccggcg

SEQ ID NO: 18046 - RNA, 61 nt, synthetic construct
  source 1..61: mol_type = other RNA
cccaggtatacatgttcctggtgaaatggcaggacctgtcggagaaggtggtctacagacg

SEQ ID NO: 18047 - RNA, 61 nt, synthetic construct
  source 1..61: mol_type = other RNA
cccaggtgtacatgttcctggtgaaatggcaggacctgtcggagaaggtggtctataggcg

SEQ ID NO: 18048 - RNA, 61 nt, synthetic construct
  source 1..61: mol_type = other RNA
cccaggtatacatgttcctggtgaaatggcaggacctgtcggagaaggtggtctataggcg

SEQ ID NO: 18049 - RNA, 61 nt, synthetic construct
  source 1..61: mol_type = other RNA
cccaggtttacatgttcctggtgaaatggcaggacctgtcggagaaggtggtctaccggcg

SEQ ID NO: 18050 - RNA, 61 nt, synthetic construct
  source 1..61: mol_type = other RNA
cccaggtttacatgttcctggtgaaatggcaggacctgtcggagaaggtggtctacaggcg

SEQ ID NO: 18051 - RNA, 61 nt, synthetic construct
  source 1..61: mol_type = other RNA
cccaggtgtacatgttcctggtgaaatggcaggacctgtcggagaaggtggtctatcggcg

SEQ ID NO: 18052 - RNA, 61 nt, synthetic construct
  source 1..61: mol_type = other RNA
cccaggtgtacatgttcctggtgaaatggcaggacctgtcggagaaggtggtctatagacg

SEQ ID NO: 18053 - RNA, 61 nt, synthetic construct
  source 1..61: mol_type = other RNA
cccaggtgtacatgttcctggtgaaatggcaggacctgtcggagaaggtggtctacagacg

SEQ ID NO: 18054 - RNA, 61 nt, synthetic construct
  source 1..61: mol_type = other RNA
cccaggtatacatgttcctggtgaaatggcaggacctgtcggagaaggtggtctatagacg

SEQ ID NO: 18055 - RNA, 61 nt, synthetic construct
  source 1..61: mol_type = other RNA
cccaggtatacatgttcctggtgaaatggcaggacctgtcggagaaggtggtctacaggcg

SEQ ID NO: 18056 - RNA, 61 nt, synthetic construct
  source 1..61: mol_type = other RNA
cccaggtatacatgttcctggtgaaatggcaggacctgtcggagaaggtggtctatcggcg

SEQ ID NO: 18057 - RNA, 61 nt, synthetic construct
  source 1..61: mol_type = other RNA
cccaggtctacatgttcctggtgaaatggcaggacctgtcggagaaggtggtctacagacg

SEQ ID NO: 18058 - RNA, 61 nt, synthetic construct
  source 1..61: mol_type = other RNA
cccaggtctacatgttcctggtgaaatggcaggacctgtcggagaaggtggtctacaggcg

SEQ ID NO: 18059 - RNA, 61 nt, synthetic construct
  source 1..61: mol_type = other RNA
cccaggtctacatgttcctggtgaaatggcaggacctgtcggagaaggtggtctaccggcg

SEQ ID NO: 18060 - RNA, 61 nt, synthetic construct
  source 1..61: mol_type = other RNA
cccaggtctacatgttcctggtgaaatggcaggacctgtcggagaaggtggtctatagacg

SEQ ID NO: 18061 - RNA, 61 nt, synthetic construct
  source 1..61: mol_type = other RNA
cccaggtctacatgttcctggtgaaatggcaggacctgtcggagaaggtggtctataggcg

SEQ ID NO: 18062 - RNA, 61 nt, synthetic construct
  source 1..61: mol_type = other RNA
cccaggtctacatgttcctggtgaaatggcaggacctgtcggagaaggtggtctatcggcg

SEQ ID NO: 18063 - RNA, 61 nt, synthetic construct
  source 1..61: mol_type = other RNA
cccaggtgtacatgttcctggtgaaatggcaggacctgtcggagaaggtggtctaccggcg

SEQ ID NO: 18064 - RNA, 61 nt, synthetic construct
  source 1..61: mol_type = other RNA
cccaggtgtacatgttcctggtgaaatggcaggacctgtcggagaaggtggtctacaggcg

SEQ ID NO: 18065 - RNA, 62 nt, synthetic construct
  source 1..62: mol_type = other RNA
ccccaggtttacatgttcctggtgaaatggcaggacctgtcggagaaggtggtctacaggcg

SEQ ID NO: 18066 - RNA, 62 nt, synthetic construct
  source 1..62: mol_type = other RNA
ccccaggtgtacatgttcctggtgaaatggcaggacctgtcggagaaggtggtctatagacg

SEQ ID NO: 18067 - RNA, 62 nt, synthetic construct
  source 1..62: mol_type = other RNA
ccccaggtgtacatgttcctggtgaaatggcaggacctgtcggagaaggtggtctatcggcg

SEQ ID NO: 18068 - RNA, 62 nt, synthetic construct
  source 1..62: mol_type = other RNA
ccccaggtgtacatgttcctggtgaaatggcaggacctgtcggagaaggtggtctaccggcg

SEQ ID NO: 18069 - RNA, 62 nt, synthetic construct
  source 1..62: mol_type = other RNA
ccccaggtctacatgttcctggtgaaatggcaggacctgtcggagaaggtggtctacaggcg

SEQ ID NO: 18070 - RNA, 62 nt, synthetic construct
  source 1..62: mol_type = other RNA
ccccaggtatacatgttcctggtgaaatggcaggacctgtcggagaaggtggtctacagacg

SEQ ID NO: 18071 - RNA, 62 nt, synthetic construct
  source 1..62: mol_type = other RNA
ccccaggtatacatgttcctggtgaaatggcaggacctgtcggagaaggtggtctacaggcg

SEQ ID NO: 18072 - RNA, 62 nt, synthetic construct
  source 1..62: mol_type = other RNA
ccccaggtatacatgttcctggtgaaatggcaggacctgtcggagaaggtggtctatagacg

SEQ ID NO: 18073 - RNA, 62 nt, synthetic construct
  source 1..62: mol_type = other RNA
ccccaggtatacatgttcctggtgaaatggcaggacctgtcggagaaggtggtctataggcg

SEQ ID NO: 18074 - RNA, 62 nt, synthetic construct
  source 1..62: mol_type = other RNA
ccccaggtctacatgttcctggtgaaatggcaggacctgtcggagaaggtggtctatcggcg

SEQ ID NO: 18075 - RNA, 62 nt, synthetic construct
  source 1..62: mol_type = other RNA
ccccaggtctacatgttcctggtgaaatggcaggacctgtcggagaaggtggtctaccggcg

SEQ ID NO: 18076 - RNA, 62 nt, synthetic construct
  source 1..62: mol_type = other RNA
ccccaggtctacatgttcctggtgaaatggcaggacctgtcggagaaggtggtctatagacg

SEQ ID NO: 18077 - RNA, 62 nt, synthetic construct
  source 1..62: mol_type = other RNA
ccccaggtctacatgttcctggtgaaatggcaggacctgtcggagaaggtggtctataggcg

SEQ ID NO: 18078 - RNA, 62 nt, synthetic construct
  source 1..62: mol_type = other RNA
ccccaggtgtacatgttcctggtgaaatggcaggacctgtcggagaaggtggtctacagacg

SEQ ID NO: 18079 - RNA, 62 nt, synthetic construct
  source 1..62: mol_type = other RNA
ccccaggtatacatgttcctggtgaaatggcaggacctgtcggagaaggtggtctaccggcg

SEQ ID NO: 18080 - RNA, 62 nt, synthetic construct
  source 1..62: mol_type = other RNA
ccccaggtgtacatgttcctggtgaaatggcaggacctgtcggagaaggtggtctacaggcg

SEQ ID NO: 18081 - RNA, 62 nt, synthetic construct
  source 1..62: mol_type = other RNA
ccccaggtttacatgttcctggtgaaatggcaggacctgtcggagaaggtggtctatcggcg

SEQ ID NO: 18082 - RNA, 62 nt, synthetic construct
  source 1..62: mol_type = other RNA
ccccaggtttacatgttcctggtgaaatggcaggacctgtcggagaaggtggtctataggcg

SEQ ID NO: 18083 - RNA, 62 nt, synthetic construct
  source 1..62: mol_type = other RNA
ccccaggtttacatgttcctggtgaaatggcaggacctgtcggagaaggtggtctatagacg

SEQ ID NO: 18084 - RNA, 62 nt, synthetic construct
  source 1..62: mol_type = other RNA
ccccaggtttacatgttcctggtgaaatggcaggacctgtcggagaaggtggtctaccggcg

SEQ ID NO: 18085 - RNA, 62 nt, synthetic construct
  source 1..62: mol_type = other RNA
ccccaggtctacatgttcctggtgaaatggcaggacctgtcggagaaggtggtctacagacg

SEQ ID NO: 18086 - RNA, 62 nt, synthetic construct
  source 1..62: mol_type = other RNA
ccccaggtttacatgttcctggtgaaatggcaggacctgtcggagaaggtggtctacagacg

SEQ ID NO: 18087 - RNA, 62 nt, synthetic construct
  source 1..62: mol_type = other RNA
ccccaggtgtacatgttcctggtgaaatggcaggacctgtcggagaaggtggtctataggcg

SEQ ID NO: 18088 - RNA, 62 nt, synthetic construct
  source 1..62: mol_type = other RNA
ccccaggtatacatgttcctggtgaaatggcaggacctgtcggagaaggtggtctatcggcg

SEQ ID NO: 18089 - RNA, 63 nt, synthetic construct
  source 1..63: mol_type = other RNA
cccccaggtgtacatgttcctggtgaaatggcaggacctgtcggagaaggtggtctaccggcg

SEQ ID NO: 18090 - RNA, 63 nt, synthetic construct
  source 1..63: mol_type = other RNA
cccccaggtttacatgttcctggtgaaatggcaggacctgtcggagaaggtggtctataggcg

SEQ ID NO: 18091 - RNA, 63 nt, synthetic construct
  source 1..63: mol_type = other RNA
cccccaggtgtacatgttcctggtgaaatggcaggacctgtcggagaaggtggtctacaggcg

SEQ ID NO: 18092 - RNA, 63 nt, synthetic construct
  source 1..63: mol_type = other RNA
cccccaggtgtacatgttcctggtgaaatggcaggacctgtcggagaaggtggtctacagacg

SEQ ID NO: 18093 - RNA, 63 nt, synthetic construct
  source 1..63: mol_type = other RNA
cccccaggtttacatgttcctggtgaaatggcaggacctgtcggagaaggtggtctacaggcg

SEQ ID NO: 18094 - RNA, 63 nt, synthetic construct
  source 1..63: mol_type = other RNA
cccccaggtgtacatgttcctggtgaaatggcaggacctgtcggagaaggtggtctatcggcg

SEQ ID NO: 18095 - RNA, 63 nt, synthetic construct
  source 1..63: mol_type = other RNA
cccccaggtgtacatgttcctggtgaaatggcaggacctgtcggagaaggtggtctataggcg

SEQ ID NO: 18096 - RNA, 63 nt, synthetic construct
  source 1..63: mol_type = other RNA
cccccaggtttacatgttcctggtgaaatggcaggacctgtcggagaaggtggtctatagacg

SEQ ID NO: 18097 - RNA, 63 nt, synthetic construct
  source 1..63: mol_type = other RNA
cccccaggtatacatgttcctggtgaaatggcaggacctgtcggagaaggtggtctatcggcg

SEQ ID NO: 18098 - RNA, 63 nt, synthetic construct
  source 1..63: mol_type = other RNA
cccccaggtctacatgttcctggtgaaatggcaggacctgtcggagaaggtggtctatcggcg

SEQ ID NO: 18099 - RNA, 63 nt, synthetic construct
  source 1..63: mol_type = other RNA
cccccaggtctacatgttcctggtgaaatggcaggacctgtcggagaaggtggtctataggcg

SEQ ID NO: 18100 - RNA, 63 nt, synthetic construct
  source 1..63: mol_type = other RNA
cccccaggtctacatgttcctggtgaaatggcaggacctgtcggagaaggtggtctatagacg

SEQ ID NO: 18101 - RNA, 63 nt, synthetic construct
  source 1..63: mol_type = other RNA
cccccaggtctacatgttcctggtgaaatggcaggacctgtcggagaaggtggtctaccggcg

SEQ ID NO: 18102 - RNA, 63 nt, synthetic construct
  source 1..63: mol_type = other RNA
cccccaggtctacatgttcctggtgaaatggcaggacctgtcggagaaggtggtctacaggcg

SEQ ID NO: 18103 - RNA, 63 nt, synthetic construct
  source 1..63: mol_type = other RNA
cccccaggtctacatgttcctggtgaaatggcaggacctgtcggagaaggtggtctacagacg

SEQ ID NO: 18104 - RNA, 63 nt, synthetic construct
  source 1..63: mol_type = other RNA
cccccaggtatacatgttcctggtgaaatggcaggacctgtcggagaaggtggtctataggcg

SEQ ID NO: 18105 - RNA, 63 nt, synthetic construct
  source 1..63: mol_type = other RNA
cccccaggtatacatgttcctggtgaaatggcaggacctgtcggagaaggtggtctatagacg

SEQ ID NO: 18106 - RNA, 63 nt, synthetic construct
  source 1..63: mol_type = other RNA
cccccaggtatacatgttcctggtgaaatggcaggacctgtcggagaaggtggtctaccggcg

SEQ ID NO: 18107 - RNA, 63 nt, synthetic construct
  source 1..63: mol_type = other RNA
cccccaggtatacatgttcctggtgaaatggcaggacctgtcggagaaggtggtctacaggcg

SEQ ID NO: 18108 - RNA, 63 nt, synthetic construct
  source 1..63: mol_type = other RNA
cccccaggtttacatgttcctggtgaaatggcaggacctgtcggagaaggtggtctacagacg

SEQ ID NO: 18109 - RNA, 63 nt, synthetic construct
  source 1..63: mol_type = other RNA
cccccaggtatacatgttcctggtgaaatggcaggacctgtcggagaaggtggtctacagacg

SEQ ID NO: 18110 - RNA, 63 nt, synthetic construct
  source 1..63: mol_type = other RNA
cccccaggtgtacatgttcctggtgaaatggcaggacctgtcggagaaggtggtctatagacg

SEQ ID NO: 18111 - RNA, 63 nt, synthetic construct
  source 1..63: mol_type = other RNA
cccccaggtttacatgttcctggtgaaatggcaggacctgtcggagaaggtggtctaccggcg

SEQ ID NO: 18112 - RNA, 63 nt, synthetic construct
  source 1..63: mol_type = other RNA
cccccaggtttacatgttcctggtgaaatggcaggacctgtcggagaaggtggtctatcggcg

SEQ ID NO: 18113 - RNA, 64 nt, synthetic construct
  source 1..64: mol_type = other RNA
tcccccaggtatacatgttcctggtgaaatggcaggacctgtcggagaaggtggtctacaggcg

SEQ ID NO: 18114 - RNA, 64 nt, synthetic construct
  source 1..64: mol_type = other RNA
tcccccaggtgtacatgttcctggtgaaatggcaggacctgtcggagaaggtggtctacaggcg

SEQ ID NO: 18115 - RNA, 64 nt, synthetic construct
  source 1..64: mol_type = other RNA
tcccccaggtatacatgttcctggtgaaatggcaggacctgtcggagaaggtggtctaccggcg

SEQ ID NO: 18116 - RNA, 64 nt, synthetic construct
  source 1..64: mol_type = other RNA
tcccccaggtatacatgttcctggtgaaatggcaggacctgtcggagaaggtggtctatagacg

SEQ ID NO: 18117 - RNA, 64 nt, synthetic construct
  source 1..64: mol_type = other RNA
tcccccaggtatacatgttcctggtgaaatggcaggacctgtcggagaaggtggtctataggcg

SEQ ID NO: 18118 - RNA, 64 nt, synthetic construct
  source 1..64: mol_type = other RNA
tcccccaggtatacatgttcctggtgaaatggcaggacctgtcggagaaggtggtctatcggcg

SEQ ID NO: 18119 - RNA, 64 nt, synthetic construct
  source 1..64: mol_type = other RNA
tcccccaggtctacatgttcctggtgaaatggcaggacctgtcggagaaggtggtctacagacg

SEQ ID NO: 18120 - RNA, 64 nt, synthetic construct
  source 1..64: mol_type = other RNA
tcccccaggtctacatgttcctggtgaaatggcaggacctgtcggagaaggtggtctaccggcg

SEQ ID NO: 18121 - RNA, 64 nt, synthetic construct
  source 1..64: mol_type = other RNA
tcccccaggtctacatgttcctggtgaaatggcaggacctgtcggagaaggtggtctatagacg

SEQ ID NO: 18122 - RNA, 64 nt, synthetic construct
  source 1..64: mol_type = other RNA
tcccccaggtctacatgttcctggtgaaatggcaggacctgtcggagaaggtggtctacaggcg

SEQ ID NO: 18123 - RNA, 64 nt, synthetic construct
  source 1..64: mol_type = other RNA
tcccccaggtgtacatgttcctggtgaaatggcaggacctgtcggagaaggtggtctacagacg

SEQ ID NO: 18124 - RNA, 64 nt, synthetic construct
  source 1..64: mol_type = other RNA
tcccccaggtatacatgttcctggtgaaatggcaggacctgtcggagaaggtggtctacagacg

SEQ ID NO: 18125 - RNA, 64 nt, synthetic construct
  source 1..64: mol_type = other RNA
tcccccaggtttacatgttcctggtgaaatggcaggacctgtcggagaaggtggtctacagacg

SEQ ID NO: 18126 - RNA, 64 nt, synthetic construct
  source 1..64: mol_type = other RNA
tcccccaggtttacatgttcctggtgaaatggcaggacctgtcggagaaggtggtctataggcg

SEQ ID NO: 18127 - RNA, 64 nt, synthetic construct
  source 1..64: mol_type = other RNA
tcccccaggtttacatgttcctggtgaaatggcaggacctgtcggagaaggtggtctatagacg

SEQ ID NO: 18128 - RNA, 64 nt, synthetic construct
  source 1..64: mol_type = other RNA
tcccccaggtttacatgttcctggtgaaatggcaggacctgtcggagaaggtggtctaccggcg

SEQ ID NO: 18129 - RNA, 64 nt, synthetic construct
  source 1..64: mol_type = other RNA
tcccccaggtttacatgttcctggtgaaatggcaggacctgtcggagaaggtggtctacaggcg

SEQ ID NO: 18130 - RNA, 64 nt, synthetic construct
  source 1..64: mol_type = other RNA
tcccccaggtctacatgttcctggtgaaatggcaggacctgtcggagaaggtggtctataggcg

SEQ ID NO: 18131 - RNA, 64 nt, synthetic construct
  source 1..64: mol_type = other RNA
tcccccaggtgtacatgttcctggtgaaatggcaggacctgtcggagaaggtggtctatcggcg

SEQ ID NO: 18132 - RNA, 64 nt, synthetic construct
  source 1..64: mol_type = other RNA
tcccccaggtgtacatgttcctggtgaaatggcaggacctgtcggagaaggtggtctataggcg

SEQ ID NO: 18133 - RNA, 64 nt, synthetic construct
  source 1..64: mol_type = other RNA
tcccccaggtgtacatgttcctggtgaaatggcaggacctgtcggagaaggtggtctatagacg

SEQ ID NO: 18134 - RNA, 64 nt, synthetic construct
  source 1..64: mol_type = other RNA
tcccccaggtgtacatgttcctggtgaaatggcaggacctgtcggagaaggtggtctaccggcg

SEQ ID NO: 18135 - RNA, 64 nt, synthetic construct
  source 1..64: mol_type = other RNA
tcccccaggtttacatgttcctggtgaaatggcaggacctgtcggagaaggtggtctatcggcg

SEQ ID NO: 18136 - RNA, 64 nt, synthetic construct
  source 1..64: mol_type = other RNA
tcccccaggtctacatgttcctggtgaaatggcaggacctgtcggagaaggtggtctatcggcg

SEQ ID NO: 18137 - RNA, 65 nt, synthetic construct
  source 1..65: mol_type = other RNA
ttcccccaggtgtacatgttcctggtgaaatggcaggacctgtcggagaaggtggtctacaggcg

SEQ ID NO: 18138 - RNA, 65 nt, synthetic construct
  source 1..65: mol_type = other RNA
ttcccccaggtctacatgttcctggtgaaatggcaggacctgtcggagaaggtggtctatcggcg

SEQ ID NO: 18139 - RNA, 65 nt, synthetic construct
  source 1..65: mol_type = other RNA
ttcccccaggtgtacatgttcctggtgaaatggcaggacctgtcggagaaggtggtctatagacg

SEQ ID NO: 18140 - RNA, 65 nt, synthetic construct
  source 1..65: mol_type = other RNA
ttcccccaggtgtacatgttcctggtgaaatggcaggacctgtcggagaaggtggtctaccggcg

SEQ ID NO: 18141 - RNA, 65 nt, synthetic construct
  source 1..65: mol_type = other RNA
ttcccccaggtgtacatgttcctggtgaaatggcaggacctgtcggagaaggtggtctataggcg

SEQ ID NO: 18142 - RNA, 65 nt, synthetic construct
  source 1..65: mol_type = other RNA
ttcccccaggtttacatgttcctggtgaaatggcaggacctgtcggagaaggtggtctatcggcg

SEQ ID NO: 18143 - RNA, 65 nt, synthetic construct
  source 1..65: mol_type = other RNA
ttcccccaggtttacatgttcctggtgaaatggcaggacctgtcggagaaggtggtctatagacg

SEQ ID NO: 18144 - RNA, 65 nt, synthetic construct
  source 1..65: mol_type = other RNA
ttcccccaggtttacatgttcctggtgaaatggcaggacctgtcggagaaggtggtctataggcg

SEQ ID NO: 18145 - RNA, 65 nt, synthetic construct
  source 1..65: mol_type = other RNA
ttcccccaggtatacatgttcctggtgaaatggcaggacctgtcggagaaggtggtctacagacg

SEQ ID NO: 18146 - RNA, 65 nt, synthetic construct
  source 1..65: mol_type = other RNA
ttcccccaggtatacatgttcctggtgaaatggcaggacctgtcggagaaggtggtctacaggcg

SEQ ID NO: 18147 - RNA, 65 nt, synthetic construct
  source 1..65: mol_type = other RNA
ttcccccaggtatacatgttcctggtgaaatggcaggacctgtcggagaaggtggtctaccggcg

SEQ ID NO: 18148 - RNA, 65 nt, synthetic construct
  source 1..65: mol_type = other RNA
ttcccccaggtatacatgttcctggtgaaatggcaggacctgtcggagaaggtggtctatagacg

SEQ ID NO: 18149 - RNA, 65 nt, synthetic construct
  source 1..65: mol_type = other RNA
ttcccccaggtatacatgttcctggtgaaatggcaggacctgtcggagaaggtggtctataggcg

SEQ ID NO: 18150 - RNA, 65 nt, synthetic construct
  source 1..65: mol_type = other RNA
ttcccccaggtctacatgttcctggtgaaatggcaggacctgtcggagaaggtggtctacagacg

SEQ ID NO: 18151 - RNA, 65 nt, synthetic construct
  source 1..65: mol_type = other RNA
ttcccccaggtctacatgttcctggtgaaatggcaggacctgtcggagaaggtggtctacaggcg

SEQ ID NO: 18152 - RNA, 65 nt, synthetic construct
  source 1..65: mol_type = other RNA
ttcccccaggtctacatgttcctggtgaaatggcaggacctgtcggagaaggtggtctaccggcg

SEQ ID NO: 18153 - RNA, 65 nt, synthetic construct
  source 1..65: mol_type = other RNA
ttcccccaggtctacatgttcctggtgaaatggcaggacctgtcggagaaggtggtctatagacg

SEQ ID NO: 18154 - RNA, 65 nt, synthetic construct
  source 1..65: mol_type = other RNA
ttcccccaggtatacatgttcctggtgaaatggcaggacctgtcggagaaggtggtctatcggcg

SEQ ID NO: 18155 - RNA, 65 nt, synthetic construct
  source 1..65: mol_type = other RNA
ttcccccaggtgtacatgttcctggtgaaatggcaggacctgtcggagaaggtggtctatcggcg

SEQ ID NO: 18156 - RNA, 65 nt, synthetic construct
  source 1..65: mol_type = other RNA
ttcccccaggtgtacatgttcctggtgaaatggcaggacctgtcggagaaggtggtctacagacg

SEQ ID NO: 18157 - RNA, 65 nt, synthetic construct
  source 1..65: mol_type = other RNA
ttcccccaggtttacatgttcctggtgaaatggcaggacctgtcggagaaggtggtctaccggcg

SEQ ID NO: 18158 - RNA, 65 nt, synthetic construct
  source 1..65: mol_type = other RNA
ttcccccaggtttacatgttcctggtgaaatggcaggacctgtcggagaaggtggtctacaggcg

SEQ ID NO: 18159 - RNA, 65 nt, synthetic construct
  source 1..65: mol_type = other RNA
ttcccccaggtctacatgttcctggtgaaatggcaggacctgtcggagaaggtggtctataggcg

SEQ ID NO: 18160 - RNA, 65 nt, synthetic construct
  source 1..65: mol_type = other RNA
ttcccccaggtttacatgttcctggtgaaatggcaggacctgtcggagaaggtggtctacagacg

SEQ ID NO: 18161 - RNA, 66 nt, synthetic construct
  source 1..66: mol_type = other RNA
tttcccccaggtgtacatgttcctggtgaaatggcaggacctgtcggagaaggtggtctacagacg

SEQ ID NO: 18162 - RNA, 66 nt, synthetic construct
  source 1..66: mol_type = other RNA
tttcccccaggtgtacatgttcctggtgaaatggcaggacctgtcggagaaggtggtctatagacg

SEQ ID NO: 18163 - RNA, 66 nt, synthetic construct
  source 1..66: mol_type = other RNA
tttcccccaggtctacatgttcctggtgaaatggcaggacctgtcggagaaggtggtctataggcg

SEQ ID NO: 18164 - RNA, 66 nt, synthetic construct
  source 1..66: mol_type = other RNA
tttcccccaggtctacatgttcctggtgaaatggcaggacctgtcggagaaggtggtctatagacg

SEQ ID NO: 18165 - RNA, 66 nt, synthetic construct
  source 1..66: mol_type = other RNA
tttcccccaggtatacatgttcctggtgaaatggcaggacctgtcggagaaggtggtctatcggcg

SEQ ID NO: 18166 - RNA, 66 nt, synthetic construct
  source 1..66: mol_type = other RNA
tttcccccaggtctacatgttcctggtgaaatggcaggacctgtcggagaaggtggtctacaggcg

SEQ ID NO: 18167 - RNA, 66 nt, synthetic construct
  source 1..66: mol_type = other RNA
tttcccccaggtctacatgttcctggtgaaatggcaggacctgtcggagaaggtggtctacagacg

SEQ ID NO: 18168 - RNA, 66 nt, synthetic construct
  source 1..66: mol_type = other RNA
tttcccccaggtgtacatgttcctggtgaaatggcaggacctgtcggagaaggtggtctacaggcg

SEQ ID NO: 18169 - RNA, 66 nt, synthetic construct
  source 1..66: mol_type = other RNA
tttcccccaggtctacatgttcctggtgaaatggcaggacctgtcggagaaggtggtctaccggcg

SEQ ID NO: 18170 - RNA, 66 nt, synthetic construct
  source 1..66: mol_type = other RNA
tttcccccaggtgtacatgttcctggtgaaatggcaggacctgtcggagaaggtggtctaccggcg

SEQ ID NO: 18171 - RNA, 66 nt, synthetic construct
  source 1..66: mol_type = other RNA
tttcccccaggtatacatgttcctggtgaaatggcaggacctgtcggagaaggtggtctaccggcg

SEQ ID NO: 18172 - RNA, 66 nt, synthetic construct
  source 1..66: mol_type = other RNA
tttcccccaggtttacatgttcctggtgaaatggcaggacctgtcggagaaggtggtctacaggcg

SEQ ID NO: 18173 - RNA, 66 nt, synthetic construct
  source 1..66: mol_type = other RNA
tttcccccaggtttacatgttcctggtgaaatggcaggacctgtcggagaaggtggtctatagacg

SEQ ID NO: 18174 - RNA, 66 nt, synthetic construct
  source 1..66: mol_type = other RNA
tttcccccaggtttacatgttcctggtgaaatggcaggacctgtcggagaaggtggtctataggcg

SEQ ID NO: 18175 - RNA, 66 nt, synthetic construct
  source 1..66: mol_type = other RNA
tttcccccaggtttacatgttcctggtgaaatggcaggacctgtcggagaaggtggtctatcggcg

SEQ ID NO: 18176 - RNA, 66 nt, synthetic construct
  source 1..66: mol_type = other RNA
tttcccccaggtatacatgttcctggtgaaatggcaggacctgtcggagaaggtggtctacagacg

SEQ ID NO: 18177 - RNA, 66 nt, synthetic construct
  source 1..66: mol_type = other RNA
tttcccccaggtatacatgttcctggtgaaatggcaggacctgtcggagaaggtggtctacaggcg

SEQ ID NO: 18178 - RNA, 66 nt, synthetic construct
  source 1..66: mol_type = other RNA
tttcccccaggtgtacatgttcctggtgaaatggcaggacctgtcggagaaggtggtctatcggcg

SEQ ID NO: 18179 - RNA, 66 nt, synthetic construct
  source 1..66: mol_type = other RNA
tttcccccaggtgtacatgttcctggtgaaatggcaggacctgtcggagaaggtggtctataggcg

SEQ ID NO: 18180 - RNA, 66 nt, synthetic construct
  source 1..66: mol_type = other RNA
tttcccccaggtatacatgttcctggtgaaatggcaggacctgtcggagaaggtggtctataggcg

SEQ ID NO: 18181 - RNA, 66 nt, synthetic construct
  source 1..66: mol_type = other RNA
tttcccccaggtttacatgttcctggtgaaatggcaggacctgtcggagaaggtggtctacagacg

SEQ ID NO: 18182 - RNA, 66 nt, synthetic construct
  source 1..66: mol_type = other RNA
tttcccccaggtatacatgttcctggtgaaatggcaggacctgtcggagaaggtggtctatagacg

SEQ ID NO: 18183 - RNA, 66 nt, synthetic construct
  source 1..66: mol_type = other RNA
tttcccccaggtctacatgttcctggtgaaatggcaggacctgtcggagaaggtggtctatcggcg

SEQ ID NO: 18184 - RNA, 66 nt, synthetic construct
  source 1..66: mol_type = other RNA
tttcccccaggtttacatgttcctggtgaaatggcaggacctgtcggagaaggtggtctaccggcg

SEQ ID NO: 18185 - RNA, 67 nt, synthetic construct
  source 1..67: mol_type = other RNA
ctttcccccaggtatacatgttcctggtgaaatggcaggacctgtcggagaaggtggtctatcggcg

SEQ ID NO: 18186 - RNA, 67 nt, synthetic construct
  source 1..67: mol_type = other RNA
ctttcccccaggtgtacatgttcctggtgaaatggcaggacctgtcggagaaggtggtctatagacg

SEQ ID NO: 18187 - RNA, 67 nt, synthetic construct
  source 1..67: mol_type = other RNA
ctttcccccaggtctacatgttcctggtgaaatggcaggacctgtcggagaaggtggtctataggcg

SEQ ID NO: 18188 - RNA, 67 nt, synthetic construct
  source 1..67: mol_type = other RNA
ctttcccccaggtctacatgttcctggtgaaatggcaggacctgtcggagaaggtggtctatagacg

SEQ ID NO: 18189 - RNA, 67 nt, synthetic construct
  source 1..67: mol_type = other RNA
ctttcccccaggtctacatgttcctggtgaaatggcaggacctgtcggagaaggtggtctaccggcg

SEQ ID NO: 18190 - RNA, 67 nt, synthetic construct
  source 1..67: mol_type = other RNA
ctttcccccaggtctacatgttcctggtgaaatggcaggacctgtcggagaaggtggtctacagacg

SEQ ID NO: 18191 - RNA, 67 nt, synthetic construct
  source 1..67: mol_type = other RNA
ctttcccccaggtctacatgttcctggtgaaatggcaggacctgtcggagaaggtggtctacaggcg

SEQ ID NO: 18192 - RNA, 67 nt, synthetic construct
  source 1..67: mol_type = other RNA
ctttcccccaggtatacatgttcctggtgaaatggcaggacctgtcggagaaggtggtctataggcg

SEQ ID NO: 18193 - RNA, 67 nt, synthetic construct
  source 1..67: mol_type = other RNA
ctttcccccaggtatacatgttcctggtgaaatggcaggacctgtcggagaaggtggtctatagacg

SEQ ID NO: 18194 - RNA, 67 nt, synthetic construct
  source 1..67: mol_type = other RNA
ctttcccccaggtatacatgttcctggtgaaatggcaggacctgtcggagaaggtggtctaccggcg

SEQ ID NO: 18195 - RNA, 67 nt, synthetic construct
  source 1..67: mol_type = other RNA
ctttcccccaggtatacatgttcctggtgaaatggcaggacctgtcggagaaggtggtctacaggcg

SEQ ID NO: 18196 - RNA, 67 nt, synthetic construct
  source 1..67: mol_type = other RNA
ctttcccccaggtatacatgttcctggtgaaatggcaggacctgtcggagaaggtggtctacagacg

SEQ ID NO: 18197 - RNA, 67 nt, synthetic construct
  source 1..67: mol_type = other RNA
ctttcccccaggtgtacatgttcctggtgaaatggcaggacctgtcggagaaggtggtctacagacg

SEQ ID NO: 18198 - RNA, 67 nt, synthetic construct
  source 1..67: mol_type = other RNA
ctttcccccaggtttacatgttcctggtgaaatggcaggacctgtcggagaaggtggtctacagacg

SEQ ID NO: 18199 - RNA, 67 nt, synthetic construct
  source 1..67: mol_type = other RNA
ctttcccccaggtctacatgttcctggtgaaatggcaggacctgtcggagaaggtggtctatcggcg

SEQ ID NO: 18200 - RNA, 67 nt, synthetic construct
  source 1..67: mol_type = other RNA
ctttcccccaggtgtacatgttcctggtgaaatggcaggacctgtcggagaaggtggtctatcggcg

SEQ ID NO: 18201 - RNA, 67 nt, synthetic construct
  source 1..67: mol_type = other RNA
ctttcccccaggtttacatgttcctggtgaaatggcaggacctgtcggagaaggtggtctatcggcg

SEQ ID NO: 18202 - RNA, 67 nt, synthetic construct
  source 1..67: mol_type = other RNA
ctttcccccaggtttacatgttcctggtgaaatggcaggacctgtcggagaaggtggtctaccggcg

SEQ ID NO: 18203 - RNA, 67 nt, synthetic construct
  source 1..67: mol_type = other RNA
ctttcccccaggtttacatgttcctggtgaaatggcaggacctgtcggagaaggtggtctatagacg

SEQ ID NO: 18204 - RNA, 67 nt, synthetic construct
  source 1..67: mol_type = other RNA
ctttcccccaggtgtacatgttcctggtgaaatggcaggacctgtcggagaaggtggtctataggcg

SEQ ID NO: 18205 - RNA, 67 nt, synthetic construct
  source 1..67: mol_type = other RNA
ctttcccccaggtgtacatgttcctggtgaaatggcaggacctgtcggagaaggtggtctaccggcg

SEQ ID NO: 18206 - RNA, 67 nt, synthetic construct
  source 1..67: mol_type = other RNA
ctttcccccaggtttacatgttcctggtgaaatggcaggacctgtcggagaaggtggtctacaggcg

SEQ ID NO: 18207 - RNA, 67 nt, synthetic construct
  source 1..67: mol_type = other RNA
ctttcccccaggtttacatgttcctggtgaaatggcaggacctgtcggagaaggtggtctataggcg

SEQ ID NO: 18208 - RNA, 67 nt, synthetic construct
  source 1..67: mol_type = other RNA
ctttcccccaggtgtacatgttcctggtgaaatggcaggacctgtcggagaaggtggtctacaggcg

SEQ ID NO: 18209 - RNA, 68 nt, synthetic construct
  source 1..68: mol_type = other RNA
gctttcccccaggtatacatgttcctggtgaaatggcaggacctgtcggagaaggtggtctataggcg

SEQ ID NO: 18210 - RNA, 68 nt, synthetic construct
  source 1..68: mol_type = other RNA
gctttcccccaggtttacatgttcctggtgaaatggcaggacctgtcggagaaggtggtctacaggcg

SEQ ID NO: 18211 - RNA, 68 nt, synthetic construct
  source 1..68: mol_type = other RNA
gctttcccccaggtttacatgttcctggtgaaatggcaggacctgtcggagaaggtggtctatagacg

SEQ ID NO: 18212 - RNA, 68 nt, synthetic construct
  source 1..68: mol_type = other RNA
gctttcccccaggtttacatgttcctggtgaaatggcaggacctgtcggagaaggtggtctataggcg

SEQ ID NO: 18213 - RNA, 68 nt, synthetic construct
  source 1..68: mol_type = other RNA
gctttcccccaggtttacatgttcctggtgaaatggcaggacctgtcggagaaggtggtctatcggcg

SEQ ID NO: 18214 - RNA, 68 nt, synthetic construct
  source 1..68: mol_type = other RNA
gctttcccccaggtttacatgttcctggtgaaatggcaggacctgtcggagaaggtggtctacagacg

SEQ ID NO: 18215 - RNA, 68 nt, synthetic construct
  source 1..68: mol_type = other RNA
gctttcccccaggtgtacatgttcctggtgaaatggcaggacctgtcggagaaggtggtctatcggcg

SEQ ID NO: 18216 - RNA, 68 nt, synthetic construct
  source 1..68: mol_type = other RNA
gctttcccccaggtctacatgttcctggtgaaatggcaggacctgtcggagaaggtggtctatagacg

SEQ ID NO: 18217 - RNA, 68 nt, synthetic construct
  source 1..68: mol_type = other RNA
gctttcccccaggtatacatgttcctggtgaaatggcaggacctgtcggagaaggtggtctacagacg

SEQ ID NO: 18218 - RNA, 68 nt, synthetic construct
  source 1..68: mol_type = other RNA
gctttcccccaggtatacatgttcctggtgaaatggcaggacctgtcggagaaggtggtctacaggcg

SEQ ID NO: 18219 - RNA, 68 nt, synthetic construct
  source 1..68: mol_type = other RNA
gctttcccccaggtctacatgttcctggtgaaatggcaggacctgtcggagaaggtggtctacagacg

SEQ ID NO: 18220 - RNA, 68 nt, synthetic construct
  source 1..68: mol_type = other RNA
gctttcccccaggtgtacatgttcctggtgaaatggcaggacctgtcggagaaggtggtctataggcg

SEQ ID NO: 18221 - RNA, 68 nt, synthetic construct
  source 1..68: mol_type = other RNA
gctttcccccaggtgtacatgttcctggtgaaatggcaggacctgtcggagaaggtggtctatagacg

SEQ ID NO: 18222 - RNA, 68 nt, synthetic construct
  source 1..68: mol_type = other RNA
gctttcccccaggtgtacatgttcctggtgaaatggcaggacctgtcggagaaggtggtctaccggcg

SEQ ID NO: 18223 - RNA, 68 nt, synthetic construct
  source 1..68: mol_type = other RNA
gctttcccccaggtgtacatgttcctggtgaaatggcaggacctgtcggagaaggtggtctacaggcg

SEQ ID NO: 18224 - RNA, 68 nt, synthetic construct
  source 1..68: mol_type = other RNA
gctttcccccaggtgtacatgttcctggtgaaatggcaggacctgtcggagaaggtggtctacagacg

SEQ ID NO: 18225 - RNA, 68 nt, synthetic construct
  source 1..68: mol_type = other RNA
gctttcccccaggtctacatgttcctggtgaaatggcaggacctgtcggagaaggtggtctatcggcg

SEQ ID NO: 18226 - RNA, 68 nt, synthetic construct
  source 1..68: mol_type = other RNA
gctttcccccaggtctacatgttcctggtgaaatggcaggacctgtcggagaaggtggtctataggcg

SEQ ID NO: 18227 - RNA, 68 nt, synthetic construct
  source 1..68: mol_type = other RNA
gctttcccccaggtctacatgttcctggtgaaatggcaggacctgtcggagaaggtggtctaccggcg

SEQ ID NO: 18228 - RNA, 68 nt, synthetic construct
  source 1..68: mol_type = other RNA
gctttcccccaggtctacatgttcctggtgaaatggcaggacctgtcggagaaggtggtctacaggcg

SEQ ID NO: 18229 - RNA, 68 nt, synthetic construct
  source 1..68: mol_type = other RNA
gctttcccccaggtatacatgttcctggtgaaatggcaggacctgtcggagaaggtggtctatcggcg

SEQ ID NO: 18230 - RNA, 68 nt, synthetic construct
  source 1..68: mol_type = other RNA
gctttcccccaggtttacatgttcctggtgaaatggcaggacctgtcggagaaggtggtctaccggcg

SEQ ID NO: 18231 - RNA, 68 nt, synthetic construct
  source 1..68: mol_type = other RNA
gctttcccccaggtatacatgttcctggtgaaatggcaggacctgtcggagaaggtggtctatagacg

SEQ ID NO: 18232 - RNA, 68 nt, synthetic construct
  source 1..68: mol_type = other RNA
gctttcccccaggtatacatgttcctggtgaaatggcaggacctgtcggagaaggtggtctaccggcg

SEQ ID NO: 18233 - RNA, 69 nt, synthetic construct
  source 1..69: mol_type = other RNA
ggctttcccccaggtctacatgttcctggtgaaatggcaggacctgtcggagaaggtggtctatcggcg

SEQ ID NO: 18234 - RNA, 69 nt, synthetic construct
  source 1..69: mol_type = other RNA
ggctttcccccaggtatacatgttcctggtgaaatggcaggacctgtcggagaaggtggtctatagacg

SEQ ID NO: 18235 - RNA, 69 nt, synthetic construct
  source 1..69: mol_type = other RNA
ggctttcccccaggtctacatgttcctggtgaaatggcaggacctgtcggagaaggtggtctataggcg

SEQ ID NO: 18236 - RNA, 69 nt, synthetic construct
  source 1..69: mol_type = other RNA
ggctttcccccaggtatacatgttcctggtgaaatggcaggacctgtcggagaaggtggtctatcggcg

SEQ ID NO: 18237 - RNA, 69 nt, synthetic construct
  source 1..69: mol_type = other RNA
ggctttcccccaggtctacatgttcctggtgaaatggcaggacctgtcggagaaggtggtctatagacg

SEQ ID NO: 18238 - RNA, 69 nt, synthetic construct
  source 1..69: mol_type = other RNA
ggctttcccccaggtctacatgttcctggtgaaatggcaggacctgtcggagaaggtggtctaccggcg

SEQ ID NO: 18239 - RNA, 69 nt, synthetic construct
  source 1..69: mol_type = other RNA
ggctttcccccaggtctacatgttcctggtgaaatggcaggacctgtcggagaaggtggtctacaggcg

SEQ ID NO: 18240 - RNA, 69 nt, synthetic construct
  source 1..69: mol_type = other RNA
ggctttcccccaggtctacatgttcctggtgaaatggcaggacctgtcggagaaggtggtctacagacg

SEQ ID NO: 18241 - RNA, 69 nt, synthetic construct
  source 1..69: mol_type = other RNA
ggctttcccccaggtatacatgttcctggtgaaatggcaggacctgtcggagaaggtggtctaccggcg

SEQ ID NO: 18242 - RNA, 69 nt, synthetic construct
  source 1..69: mol_type = other RNA
ggctttcccccaggtatacatgttcctggtgaaatggcaggacctgtcggagaaggtggtctacaggcg

SEQ ID NO: 18243 - RNA, 69 nt, synthetic construct
  source 1..69: mol_type = other RNA
ggctttcccccaggtgtacatgttcctggtgaaatggcaggacctgtcggagaaggtggtctacagacg

SEQ ID NO: 18244 - RNA, 69 nt, synthetic construct
  source 1..69: mol_type = other RNA
ggctttcccccaggtatacatgttcctggtgaaatggcaggacctgtcggagaaggtggtctacagacg

SEQ ID NO: 18245 - RNA, 69 nt, synthetic construct
  source 1..69: mol_type = other RNA
ggctttcccccaggtgtacatgttcctggtgaaatggcaggacctgtcggagaaggtggtctacaggcg

SEQ ID NO: 18246 - RNA, 69 nt, synthetic construct
  source 1..69: mol_type = other RNA
ggctttcccccaggtgtacatgttcctggtgaaatggcaggacctgtcggagaaggtggtctaccggcg

SEQ ID NO: 18247 - RNA, 69 nt, synthetic construct
  source 1..69: mol_type = other RNA
ggctttcccccaggtgtacatgttcctggtgaaatggcaggacctgtcggagaaggtggtctatagacg

SEQ ID NO: 18248 - RNA, 69 nt, synthetic construct
  source 1..69: mol_type = other RNA
ggctttcccccaggtgtacatgttcctggtgaaatggcaggacctgtcggagaaggtggtctataggcg

SEQ ID NO: 18249 - RNA, 69 nt, synthetic construct
  source 1..69: mol_type = other RNA
ggctttcccccaggtgtacatgttcctggtgaaatggcaggacctgtcggagaaggtggtctatcggcg

SEQ ID NO: 18250 - RNA, 69 nt, synthetic construct
  source 1..69: mol_type = other RNA
ggctttcccccaggtttacatgttcctggtgaaatggcaggacctgtcggagaaggtggtctacagacg

SEQ ID NO: 18251 - RNA, 69 nt, synthetic construct
  source 1..69: mol_type = other RNA
ggctttcccccaggtttacatgttcctggtgaaatggcaggacctgtcggagaaggtggtctacaggcg

SEQ ID NO: 18252 - RNA, 69 nt, synthetic construct
  source 1..69: mol_type = other RNA
ggctttcccccaggtttacatgttcctggtgaaatggcaggacctgtcggagaaggtggtctaccggcg

SEQ ID NO: 18253 - RNA, 69 nt, synthetic construct
  source 1..69: mol_type = other RNA
ggctttcccccaggtttacatgttcctggtgaaatggcaggacctgtcggagaaggtggtctatagacg

SEQ ID NO: 18254 - RNA, 69 nt, synthetic construct
  source 1..69: mol_type = other RNA
ggctttcccccaggtttacatgttcctggtgaaatggcaggacctgtcggagaaggtggtctataggcg

SEQ ID NO: 18255 - RNA, 69 nt, synthetic construct
  source 1..69: mol_type = other RNA
ggctttcccccaggtatacatgttcctggtgaaatggcaggacctgtcggagaaggtggtctataggcg

SEQ ID NO: 18256 - RNA, 69 nt, synthetic construct
  source 1..69: mol_type = other RNA
ggctttcccccaggtttacatgttcctggtgaaatggcaggacctgtcggagaaggtggtctatcggcg

SEQ ID NO: 18257 - RNA, 70 nt, synthetic construct
  source 1..70: mol_type = other RNA
tggctttcccccaggtatacatgttcctggtgaaatggcaggacctgtcggagaaggtggtctataggcg

SEQ ID NO: 18258 - RNA, 70 nt, synthetic construct
  source 1..70: mol_type = other RNA
tggctttcccccaggtctacatgttcctggtgaaatggcaggacctgtcggagaaggtggtctacagacg

SEQ ID NO: 18259 - RNA, 70 nt, synthetic construct
  source 1..70: mol_type = other RNA
tggctttcccccaggtctacatgttcctggtgaaatggcaggacctgtcggagaaggtggtctaccggcg

SEQ ID NO: 18260 - RNA, 70 nt, synthetic construct
  source 1..70: mol_type = other RNA
tggctttcccccaggtatacatgttcctggtgaaatggcaggacctgtcggagaaggtggtctatcggcg

SEQ ID NO: 18261 - RNA, 70 nt, synthetic construct
  source 1..70: mol_type = other RNA
tggctttcccccaggtatacatgttcctggtgaaatggcaggacctgtcggagaaggtggtctatagacg

SEQ ID NO: 18262 - RNA, 70 nt, synthetic construct
  source 1..70: mol_type = other RNA
tggctttcccccaggtctacatgttcctggtgaaatggcaggacctgtcggagaaggtggtctacaggcg

SEQ ID NO: 18263 - RNA, 70 nt, synthetic construct
  source 1..70: mol_type = other RNA
tggctttcccccaggtatacatgttcctggtgaaatggcaggacctgtcggagaaggtggtctacaggcg

SEQ ID NO: 18264 - RNA, 70 nt, synthetic construct
  source 1..70: mol_type = other RNA
tggctttcccccaggtatacatgttcctggtgaaatggcaggacctgtcggagaaggtggtctacagacg

SEQ ID NO: 18265 - RNA, 70 nt, synthetic construct
  source 1..70: mol_type = other RNA
tggctttcccccaggtgtacatgttcctggtgaaatggcaggacctgtcggagaaggtggtctacagacg

SEQ ID NO: 18266 - RNA, 70 nt, synthetic construct
  source 1..70: mol_type = other RNA
tggctttcccccaggtctacatgttcctggtgaaatggcaggacctgtcggagaaggtggtctatagacg

SEQ ID NO: 18267 - RNA, 70 nt, synthetic construct
  source 1..70: mol_type = other RNA
tggctttcccccaggtatacatgttcctggtgaaatggcaggacctgtcggagaaggtggtctaccggcg

SEQ ID NO: 18268 - RNA, 70 nt, synthetic construct
  source 1..70: mol_type = other RNA
tggctttcccccaggtctacatgttcctggtgaaatggcaggacctgtcggagaaggtggtctataggcg

SEQ ID NO: 18269 - RNA, 70 nt, synthetic construct
  source 1..70: mol_type = other RNA
tggctttcccccaggtgtacatgttcctggtgaaatggcaggacctgtcggagaaggtggtctacaggcg

SEQ ID NO: 18270 - RNA, 70 nt, synthetic construct
  source 1..70: mol_type = other RNA
tggctttcccccaggtgtacatgttcctggtgaaatggcaggacctgtcggagaaggtggtctataggcg

SEQ ID NO: 18271 - RNA, 70 nt, synthetic construct
  source 1..70: mol_type = other RNA
tggctttcccccaggtgtacatgttcctggtgaaatggcaggacctgtcggagaaggtggtctatcggcg

SEQ ID NO: 18272 - RNA, 70 nt, synthetic construct
  source 1..70: mol_type = other RNA
tggctttcccccaggtttacatgttcctggtgaaatggcaggacctgtcggagaaggtggtctacaggcg

SEQ ID NO: 18273 - RNA, 70 nt, synthetic construct
  source 1..70: mol_type = other RNA
tggctttcccccaggtgtacatgttcctggtgaaatggcaggacctgtcggagaaggtggtctaccggcg

SEQ ID NO: 18274 - RNA, 70 nt, synthetic construct
  source 1..70: mol_type = other RNA
tggctttcccccaggtctacatgttcctggtgaaatggcaggacctgtcggagaaggtggtctatcggcg

SEQ ID NO: 18275 - RNA, 70 nt, synthetic construct
  source 1..70: mol_type = other RNA
tggctttcccccaggtttacatgttcctggtgaaatggcaggacctgtcggagaaggtggtctatagacg

SEQ ID NO: 18276 - RNA, 70 nt, synthetic construct
  source 1..70: mol_type = other RNA
tggctttcccccaggtgtacatgttcctggtgaaatggcaggacctgtcggagaaggtggtctatagacg

SEQ ID NO: 18277 - RNA, 70 nt, synthetic construct
  source 1..70: mol_type = other RNA
tggctttcccccaggtttacatgttcctggtgaaatggcaggacctgtcggagaaggtggtctaccggcg

SEQ ID NO: 18278 - RNA, 70 nt, synthetic construct
  source 1..70: mol_type = other RNA
tggctttcccccaggtttacatgttcctggtgaaatggcaggacctgtcggagaaggtggtctacagacg

SEQ ID NO: 18279 - RNA, 70 nt, synthetic construct
  source 1..70: mol_type = other RNA
tggctttcccccaggtttacatgttcctggtgaaatggcaggacctgtcggagaaggtggtctatcggcg

SEQ ID NO: 18280 - RNA, 70 nt, synthetic construct
  source 1..70: mol_type = other RNA
tggctttcccccaggtttacatgttcctggtgaaatggcaggacctgtcggagaaggtggtctataggcg

SEQ ID NO: 18281 - RNA, 71 nt, synthetic construct
  source 1..71: mol_type = other RNA
ctggctttcccccaggtttacatgttcctggtgaaatggcaggacctgtcggagaaggtggtctacagacg

SEQ ID NO: 18282 - RNA, 71 nt, synthetic construct
  source 1..71: mol_type = other RNA
ctggctttcccccaggtatacatgttcctggtgaaatggcaggacctgtcggagaaggtggtctacagacg

SEQ ID NO: 18283 - RNA, 71 nt, synthetic construct
  source 1..71: mol_type = other RNA
ctggctttcccccaggtttacatgttcctggtgaaatggcaggacctgtcggagaaggtggtctaccggcg

SEQ ID NO: 18284 - RNA, 71 nt, synthetic construct
  source 1..71: mol_type = other RNA
ctggctttcccccaggtttacatgttcctggtgaaatggcaggacctgtcggagaaggtggtctatagacg

SEQ ID NO: 18285 - RNA, 71 nt, synthetic construct
  source 1..71: mol_type = other RNA
ctggctttcccccaggtttacatgttcctggtgaaatggcaggacctgtcggagaaggtggtctataggcg

SEQ ID NO: 18286 - RNA, 71 nt, synthetic construct
  source 1..71: mol_type = other RNA
ctggctttcccccaggtttacatgttcctggtgaaatggcaggacctgtcggagaaggtggtctatcggcg

SEQ ID NO: 18287 - RNA, 71 nt, synthetic construct
  source 1..71: mol_type = other RNA
ctggctttcccccaggtgtacatgttcctggtgaaatggcaggacctgtcggagaaggtggtctatcggcg

SEQ ID NO: 18288 - RNA, 71 nt, synthetic construct
  source 1..71: mol_type = other RNA
ctggctttcccccaggtctacatgttcctggtgaaatggcaggacctgtcggagaaggtggtctataggcg

SEQ ID NO: 18289 - RNA, 71 nt, synthetic construct
  source 1..71: mol_type = other RNA
ctggctttcccccaggtgtacatgttcctggtgaaatggcaggacctgtcggagaaggtggtctaccggcg

SEQ ID NO: 18290 - RNA, 71 nt, synthetic construct
  source 1..71: mol_type = other RNA
ctggctttcccccaggtctacatgttcctggtgaaatggcaggacctgtcggagaaggtggtctatcggcg

SEQ ID NO: 18291 - RNA, 71 nt, synthetic construct
  source 1..71: mol_type = other RNA
ctggctttcccccaggtgtacatgttcctggtgaaatggcaggacctgtcggagaaggtggtctataggcg

SEQ ID NO: 18292 - RNA, 71 nt, synthetic construct
  source 1..71: mol_type = other RNA
ctggctttcccccaggtgtacatgttcctggtgaaatggcaggacctgtcggagaaggtggtctatagacg

SEQ ID NO: 18293 - RNA, 71 nt, synthetic construct
  source 1..71: mol_type = other RNA
ctggctttcccccaggtgtacatgttcctggtgaaatggcaggacctgtcggagaaggtggtctacagacg

SEQ ID NO: 18294 - RNA, 71 nt, synthetic construct
  source 1..71: mol_type = other RNA
ctggctttcccccaggtttacatgttcctggtgaaatggcaggacctgtcggagaaggtggtctacaggcg

SEQ ID NO: 18295 - RNA, 71 nt, synthetic construct
  source 1..71: mol_type = other RNA
ctggctttcccccaggtctacatgttcctggtgaaatggcaggacctgtcggagaaggtggtctaccggcg

SEQ ID NO: 18296 - RNA, 71 nt, synthetic construct
  source 1..71: mol_type = other RNA
ctggctttcccccaggtctacatgttcctggtgaaatggcaggacctgtcggagaaggtggtctacaggcg

SEQ ID NO: 18297 - RNA, 71 nt, synthetic construct
  source 1..71: mol_type = other RNA
ctggctttcccccaggtctacatgttcctggtgaaatggcaggacctgtcggagaaggtggtctacagacg

SEQ ID NO: 18298 - RNA, 71 nt, synthetic construct
  source 1..71: mol_type = other RNA
ctggctttcccccaggtatacatgttcctggtgaaatggcaggacctgtcggagaaggtggtctatcggcg

SEQ ID NO: 18299 - RNA, 71 nt, synthetic construct
  source 1..71: mol_type = other RNA
ctggctttcccccaggtatacatgttcctggtgaaatggcaggacctgtcggagaaggtggtctatagacg

SEQ ID NO: 18300 - RNA, 71 nt, synthetic construct
  source 1..71: mol_type = other RNA
ctggctttcccccaggtatacatgttcctggtgaaatggcaggacctgtcggagaaggtggtctaccggcg

SEQ ID NO: 18301 - RNA, 71 nt, synthetic construct
  source 1..71: mol_type = other RNA
ctggctttcccccaggtatacatgttcctggtgaaatggcaggacctgtcggagaaggtggtctataggcg

SEQ ID NO: 18302 - RNA, 71 nt, synthetic construct
  source 1..71: mol_type = other RNA
ctggctttcccccaggtctacatgttcctggtgaaatggcaggacctgtcggagaaggtggtctatagacg

SEQ ID NO: 18303 - RNA, 71 nt, synthetic construct
  source 1..71: mol_type = other RNA
ctggctttcccccaggtgtacatgttcctggtgaaatggcaggacctgtcggagaaggtggtctacaggcg

SEQ ID NO: 18304 - RNA, 71 nt, synthetic construct
  source 1..71: mol_type = other RNA
ctggctttcccccaggtatacatgttcctggtgaaatggcaggacctgtcggagaaggtggtctacaggcg

SEQ ID NO: 18305 - RNA, 72 nt, synthetic construct
  source 1..72: mol_type = other RNA
tctggctttcccccaggtctacatgttcctggtgaaatggcaggacctgtcggagaaggtggtctatcggcg

SEQ ID NO: 18306 - RNA, 72 nt, synthetic construct
  source 1..72: mol_type = other RNA
tctggctttcccccaggtctacatgttcctggtgaaatggcaggacctgtcggagaaggtggtctacaggcg

SEQ ID NO: 18307 - RNA, 72 nt, synthetic construct
  source 1..72: mol_type = other RNA
tctggctttcccccaggtatacatgttcctggtgaaatggcaggacctgtcggagaaggtggtctatcggcg

SEQ ID NO: 18308 - RNA, 72 nt, synthetic construct
  source 1..72: mol_type = other RNA
tctggctttcccccaggtatacatgttcctggtgaaatggcaggacctgtcggagaaggtggtctacagacg

SEQ ID NO: 18309 - RNA, 72 nt, synthetic construct
  source 1..72: mol_type = other RNA
tctggctttcccccaggtctacatgttcctggtgaaatggcaggacctgtcggagaaggtggtctataggcg

SEQ ID NO: 18310 - RNA, 72 nt, synthetic construct
  source 1..72: mol_type = other RNA
tctggctttcccccaggtttacatgttcctggtgaaatggcaggacctgtcggagaaggtggtctacagacg

SEQ ID NO: 18311 - RNA, 72 nt, synthetic construct
  source 1..72: mol_type = other RNA
tctggctttcccccaggtctacatgttcctggtgaaatggcaggacctgtcggagaaggtggtctacagacg

SEQ ID NO: 18312 - RNA, 72 nt, synthetic construct
  source 1..72: mol_type = other RNA
tctggctttcccccaggtctacatgttcctggtgaaatggcaggacctgtcggagaaggtggtctatagacg

SEQ ID NO: 18313 - RNA, 72 nt, synthetic construct
  source 1..72: mol_type = other RNA
tctggctttcccccaggtctacatgttcctggtgaaatggcaggacctgtcggagaaggtggtctaccggcg

SEQ ID NO: 18314 - RNA, 72 nt, synthetic construct
  source 1..72: mol_type = other RNA
tctggctttcccccaggtgtacatgttcctggtgaaatggcaggacctgtcggagaaggtggtctaccggcg

SEQ ID NO: 18315 - RNA, 72 nt, synthetic construct
  source 1..72: mol_type = other RNA
tctggctttcccccaggtgtacatgttcctggtgaaatggcaggacctgtcggagaaggtggtctataggcg

SEQ ID NO: 18316 - RNA, 72 nt, synthetic construct
  source 1..72: mol_type = other RNA
tctggctttcccccaggtgtacatgttcctggtgaaatggcaggacctgtcggagaaggtggtctatcggcg

SEQ ID NO: 18317 - RNA, 72 nt, synthetic construct
  source 1..72: mol_type = other RNA
tctggctttcccccaggtttacatgttcctggtgaaatggcaggacctgtcggagaaggtggtctatagacg

SEQ ID NO: 18318 - RNA, 72 nt, synthetic construct
  source 1..72: mol_type = other RNA
tctggctttcccccaggtttacatgttcctggtgaaatggcaggacctgtcggagaaggtggtctataggcg

SEQ ID NO: 18319 - RNA, 72 nt, synthetic construct
  source 1..72: mol_type = other RNA
tctggctttcccccaggtttacatgttcctggtgaaatggcaggacctgtcggagaaggtggtctatcggcg

SEQ ID NO: 18320 - RNA, 72 nt, synthetic construct
  source 1..72: mol_type = other RNA
tctggctttcccccaggtgtacatgttcctggtgaaatggcaggacctgtcggagaaggtggtctacaggcg

SEQ ID NO: 18321 - RNA, 72 nt, synthetic construct
  source 1..72: mol_type = other RNA
tctggctttcccccaggtttacatgttcctggtgaaatggcaggacctgtcggagaaggtggtctacaggcg

SEQ ID NO: 18322 - RNA, 72 nt, synthetic construct
  source 1..72: mol_type = other RNA
tctggctttcccccaggtgtacatgttcctggtgaaatggcaggacctgtcggagaaggtggtctacagacg

SEQ ID NO: 18323 - RNA, 72 nt, synthetic construct
  source 1..72: mol_type = other RNA
tctggctttcccccaggtttacatgttcctggtgaaatggcaggacctgtcggagaaggtggtctaccggcg

SEQ ID NO: 18324 - RNA, 72 nt, synthetic construct
  source 1..72: mol_type = other RNA
tctggctttcccccaggtatacatgttcctggtgaaatggcaggacctgtcggagaaggtggtctataggcg

SEQ ID NO: 18325 - RNA, 72 nt, synthetic construct
  source 1..72: mol_type = other RNA
tctggctttcccccaggtatacatgttcctggtgaaatggcaggacctgtcggagaaggtggtctatagacg

SEQ ID NO: 18326 - RNA, 72 nt, synthetic construct
  source 1..72: mol_type = other RNA
tctggctttcccccaggtatacatgttcctggtgaaatggcaggacctgtcggagaaggtggtctaccggcg

SEQ ID NO: 18327 - RNA, 72 nt, synthetic construct
  source 1..72: mol_type = other RNA
tctggctttcccccaggtatacatgttcctggtgaaatggcaggacctgtcggagaaggtggtctacaggcg

SEQ ID NO: 18328 - RNA, 72 nt, synthetic construct
  source 1..72: mol_type = other RNA
tctggctttcccccaggtgtacatgttcctggtgaaatggcaggacctgtcggagaaggtggtctatagacg

SEQ ID NO: 18329 - RNA, 73 nt, synthetic construct
  source 1..73: mol_type = other RNA
ctctggctttcccccaggtgtacatgttcctggtgaaatggcaggacctgtcggagaaggtggtctacagacg

SEQ ID NO: 18330 - RNA, 73 nt, synthetic construct
  source 1..73: mol_type = other RNA
ctctggctttcccccaggtttacatgttcctggtgaaatggcaggacctgtcggagaaggtggtctataggcg

SEQ ID NO: 18331 - RNA, 73 nt, synthetic construct
  source 1..73: mol_type = other RNA
ctctggctttcccccaggtttacatgttcctggtgaaatggcaggacctgtcggagaaggtggtctatagacg

SEQ ID NO: 18332 - RNA, 73 nt, synthetic construct
  source 1..73: mol_type = other RNA
ctctggctttcccccaggtttacatgttcctggtgaaatggcaggacctgtcggagaaggtggtctaccggcg

SEQ ID NO: 18333 - RNA, 73 nt, synthetic construct
  source 1..73: mol_type = other RNA
ctctggctttcccccaggtttacatgttcctggtgaaatggcaggacctgtcggagaaggtggtctacaggcg

SEQ ID NO: 18334 - RNA, 73 nt, synthetic construct
  source 1..73: mol_type = other RNA
ctctggctttcccccaggtttacatgttcctggtgaaatggcaggacctgtcggagaaggtggtctacagacg

SEQ ID NO: 18335 - RNA, 73 nt, synthetic construct
  source 1..73: mol_type = other RNA
ctctggctttcccccaggtgtacatgttcctggtgaaatggcaggacctgtcggagaaggtggtctataggcg

SEQ ID NO: 18336 - RNA, 73 nt, synthetic construct
  source 1..73: mol_type = other RNA
ctctggctttcccccaggtgtacatgttcctggtgaaatggcaggacctgtcggagaaggtggtctatagacg

SEQ ID NO: 18337 - RNA, 73 nt, synthetic construct
  source 1..73: mol_type = other RNA
ctctggctttcccccaggtgtacatgttcctggtgaaatggcaggacctgtcggagaaggtggtctaccggcg

SEQ ID NO: 18338 - RNA, 73 nt, synthetic construct
  source 1..73: mol_type = other RNA
ctctggctttcccccaggtgtacatgttcctggtgaaatggcaggacctgtcggagaaggtggtctacaggcg

SEQ ID NO: 18339 - RNA, 73 nt, synthetic construct
  source 1..73: mol_type = other RNA
ctctggctttcccccaggtttacatgttcctggtgaaatggcaggacctgtcggagaaggtggtctatcggcg

SEQ ID NO: 18340 - RNA, 73 nt, synthetic construct
  source 1..73: mol_type = other RNA
ctctggctttcccccaggtctacatgttcctggtgaaatggcaggacctgtcggagaaggtggtctatcggcg

SEQ ID NO: 18341 - RNA, 73 nt, synthetic construct
  source 1..73: mol_type = other RNA
ctctggctttcccccaggtctacatgttcctggtgaaatggcaggacctgtcggagaaggtggtctatagacg

SEQ ID NO: 18342 - RNA, 73 nt, synthetic construct
  source 1..73: mol_type = other RNA
ctctggctttcccccaggtctacatgttcctggtgaaatggcaggacctgtcggagaaggtggtctaccggcg

SEQ ID NO: 18343 - RNA, 73 nt, synthetic construct
  source 1..73: mol_type = other RNA
ctctggctttcccccaggtctacatgttcctggtgaaatggcaggacctgtcggagaaggtggtctacagacg

SEQ ID NO: 18344 - RNA, 73 nt, synthetic construct
  source 1..73: mol_type = other RNA
ctctggctttcccccaggtatacatgttcctggtgaaatggcaggacctgtcggagaaggtggtctatcggcg

SEQ ID NO: 18345 - RNA, 73 nt, synthetic construct
  source 1..73: mol_type = other RNA
ctctggctttcccccaggtatacatgttcctggtgaaatggcaggacctgtcggagaaggtggtctataggcg

SEQ ID NO: 18346 - RNA, 73 nt, synthetic construct
  source 1..73: mol_type = other RNA
ctctggctttcccccaggtatacatgttcctggtgaaatggcaggacctgtcggagaaggtggtctatagacg

SEQ ID NO: 18347 - RNA, 73 nt, synthetic construct
  source 1..73: mol_type = other RNA
ctctggctttcccccaggtatacatgttcctggtgaaatggcaggacctgtcggagaaggtggtctaccggcg

SEQ ID NO: 18348 - RNA, 73 nt, synthetic construct
  source 1..73: mol_type = other RNA
ctctggctttcccccaggtatacatgttcctggtgaaatggcaggacctgtcggagaaggtggtctacaggcg

SEQ ID NO: 18349 - RNA, 73 nt, synthetic construct
  source 1..73: mol_type = other RNA
ctctggctttcccccaggtatacatgttcctggtgaaatggcaggacctgtcggagaaggtggtctacagacg

SEQ ID NO: 18350 - RNA, 73 nt, synthetic construct
  source 1..73: mol_type = other RNA
ctctggctttcccccaggtctacatgttcctggtgaaatggcaggacctgtcggagaaggtggtctataggcg

SEQ ID NO: 18351 - RNA, 73 nt, synthetic construct
  source 1..73: mol_type = other RNA
ctctggctttcccccaggtgtacatgttcctggtgaaatggcaggacctgtcggagaaggtggtctatcggcg

SEQ ID NO: 18352 - RNA, 73 nt, synthetic construct
  source 1..73: mol_type = other RNA
ctctggctttcccccaggtctacatgttcctggtgaaatggcaggacctgtcggagaaggtggtctacaggcg

SEQ ID NO: 18353 - RNA, 74 nt, synthetic construct
  source 1..74: mol_type = other RNA
actctggctttcccccaggtttacatgttcctggtgaaatggcaggacctgtcggagaaggtggtctacaggcg

SEQ ID NO: 18354 - RNA, 74 nt, synthetic construct
  source 1..74: mol_type = other RNA
actctggctttcccccaggtttacatgttcctggtgaaatggcaggacctgtcggagaaggtggtctacagacg

SEQ ID NO: 18355 - RNA, 74 nt, synthetic construct
  source 1..74: mol_type = other RNA
actctggctttcccccaggtttacatgttcctggtgaaatggcaggacctgtcggagaaggtggtctataggcg

SEQ ID NO: 18356 - RNA, 74 nt, synthetic construct
  source 1..74: mol_type = other RNA
actctggctttcccccaggtttacatgttcctggtgaaatggcaggacctgtcggagaaggtggtctatagacg

SEQ ID NO: 18357 - RNA, 74 nt, synthetic construct
  source 1..74: mol_type = other RNA
actctggctttcccccaggtttacatgttcctggtgaaatggcaggacctgtcggagaaggtggtctaccggcg

SEQ ID NO: 18358 - RNA, 74 nt, synthetic construct
  source 1..74: mol_type = other RNA
actctggctttcccccaggtgtacatgttcctggtgaaatggcaggacctgtcggagaaggtggtctacaggcg

SEQ ID NO: 18359 - RNA, 74 nt, synthetic construct
  source 1..74: mol_type = other RNA
actctggctttcccccaggtgtacatgttcctggtgaaatggcaggacctgtcggagaaggtggtctatcggcg

SEQ ID NO: 18360 - RNA, 74 nt, synthetic construct
  source 1..74: mol_type = other RNA
actctggctttcccccaggtgtacatgttcctggtgaaatggcaggacctgtcggagaaggtggtctataggcg

SEQ ID NO: 18361 - RNA, 74 nt, synthetic construct
  source 1..74: mol_type = other RNA
actctggctttcccccaggtgtacatgttcctggtgaaatggcaggacctgtcggagaaggtggtctatagacg

SEQ ID NO: 18362 - RNA, 74 nt, synthetic construct
  source 1..74: mol_type = other RNA
actctggctttcccccaggtgtacatgttcctggtgaaatggcaggacctgtcggagaaggtggtctaccggcg

SEQ ID NO: 18363 - RNA, 74 nt, synthetic construct
  source 1..74: mol_type = other RNA
actctggctttcccccaggtatacatgttcctggtgaaatggcaggacctgtcggagaaggtggtctataggcg

SEQ ID NO: 18364 - RNA, 74 nt, synthetic construct
  source 1..74: mol_type = other RNA
actctggctttcccccaggtttacatgttcctggtgaaatggcaggacctgtcggagaaggtggtctatcggcg

SEQ ID NO: 18365 - RNA, 74 nt, synthetic construct
  source 1..74: mol_type = other RNA
actctggctttcccccaggtctacatgttcctggtgaaatggcaggacctgtcggagaaggtggtctatagacg

SEQ ID NO: 18366 - RNA, 74 nt, synthetic construct
  source 1..74: mol_type = other RNA
actctggctttcccccaggtctacatgttcctggtgaaatggcaggacctgtcggagaaggtggtctaccggcg

SEQ ID NO: 18367 - RNA, 74 nt, synthetic construct
  source 1..74: mol_type = other RNA
actctggctttcccccaggtctacatgttcctggtgaaatggcaggacctgtcggagaaggtggtctacagacg

SEQ ID NO: 18368 - RNA, 74 nt, synthetic construct
  source 1..74: mol_type = other RNA
actctggctttcccccaggtgtacatgttcctggtgaaatggcaggacctgtcggagaaggtggtctacagacg

SEQ ID NO: 18369 - RNA, 74 nt, synthetic construct
  source 1..74: mol_type = other RNA
actctggctttcccccaggtctacatgttcctggtgaaatggcaggacctgtcggagaaggtggtctatcggcg

SEQ ID NO: 18370 - RNA, 74 nt, synthetic construct
  source 1..74: mol_type = other RNA
actctggctttcccccaggtatacatgttcctggtgaaatggcaggacctgtcggagaaggtggtctatagacg

SEQ ID NO: 18371 - RNA, 74 nt, synthetic construct
  source 1..74: mol_type = other RNA
actctggctttcccccaggtctacatgttcctggtgaaatggcaggacctgtcggagaaggtggtctacaggcg

SEQ ID NO: 18372 - RNA, 74 nt, synthetic construct
  source 1..74: mol_type = other RNA
actctggctttcccccaggtctacatgttcctggtgaaatggcaggacctgtcggagaaggtggtctataggcg

SEQ ID NO: 18373 - RNA, 74 nt, synthetic construct
  source 1..74: mol_type = other RNA
actctggctttcccccaggtatacatgttcctggtgaaatggcaggacctgtcggagaaggtggtctacagacg

SEQ ID NO: 18374 - RNA, 74 nt, synthetic construct
  source 1..74: mol_type = other RNA
actctggctttcccccaggtatacatgttcctggtgaaatggcaggacctgtcggagaaggtggtctatcggcg

SEQ ID NO: 18375 - RNA, 74 nt, synthetic construct
  source 1..74: mol_type = other RNA
actctggctttcccccaggtatacatgttcctggtgaaatggcaggacctgtcggagaaggtggtctaccggcg

SEQ ID NO: 18376 - RNA, 74 nt, synthetic construct
  source 1..74: mol_type = other RNA
actctggctttcccccaggtatacatgttcctggtgaaatggcaggacctgtcggagaaggtggtctacaggcg

SEQ ID NO: 18377 - RNA, 75 nt, synthetic construct
  source 1..75: mol_type = other RNA
gactctggctttcccccaggtctacatgttcctggtgaaatggcaggacctgtcggagaaggtggtctaccggcg

SEQ ID NO: 18378 - RNA, 75 nt, synthetic construct
  source 1..75: mol_type = other RNA
gactctggctttcccccaggtctacatgttcctggtgaaatggcaggacctgtcggagaaggtggtctacaggcg

SEQ ID NO: 18379 - RNA, 75 nt, synthetic construct
  source 1..75: mol_type = other RNA
gactctggctttcccccaggtctacatgttcctggtgaaatggcaggacctgtcggagaaggtggtctacagacg

SEQ ID NO: 18380 - RNA, 75 nt, synthetic construct
  source 1..75: mol_type = other RNA
gactctggctttcccccaggtatacatgttcctggtgaaatggcaggacctgtcggagaaggtggtctaccggcg

SEQ ID NO: 18381 - RNA, 75 nt, synthetic construct
  source 1..75: mol_type = other RNA
gactctggctttcccccaggtatacatgttcctggtgaaatggcaggacctgtcggagaaggtggtctataggcg

SEQ ID NO: 18382 - RNA, 75 nt, synthetic construct
  source 1..75: mol_type = other RNA
gactctggctttcccccaggtatacatgttcctggtgaaatggcaggacctgtcggagaaggtggtctatagacg

SEQ ID NO: 18383 - RNA, 75 nt, synthetic construct
  source 1..75: mol_type = other RNA
gactctggctttcccccaggtatacatgttcctggtgaaatggcaggacctgtcggagaaggtggtctacaggcg

SEQ ID NO: 18384 - RNA, 75 nt, synthetic construct
  source 1..75: mol_type = other RNA
gactctggctttcccccaggtatacatgttcctggtgaaatggcaggacctgtcggagaaggtggtctacagacg

SEQ ID NO: 18385 - RNA, 75 nt, synthetic construct
  source 1..75: mol_type = other RNA
gactctggctttcccccaggtctacatgttcctggtgaaatggcaggacctgtcggagaaggtggtctatcggcg

SEQ ID NO: 18386 - RNA, 75 nt, synthetic construct
  source 1..75: mol_type = other RNA
gactctggctttcccccaggtctacatgttcctggtgaaatggcaggacctgtcggagaaggtggtctataggcg

SEQ ID NO: 18387 - RNA, 75 nt, synthetic construct
  source 1..75: mol_type = other RNA
gactctggctttcccccaggtatacatgttcctggtgaaatggcaggacctgtcggagaaggtggtctatcggcg

SEQ ID NO: 18388 - RNA, 75 nt, synthetic construct
  source 1..75: mol_type = other RNA
gactctggctttcccccaggtttacatgttcctggtgaaatggcaggacctgtcggagaaggtggtctatcggcg

SEQ ID NO: 18389 - RNA, 75 nt, synthetic construct
  source 1..75: mol_type = other RNA
gactctggctttcccccaggtgtacatgttcctggtgaaatggcaggacctgtcggagaaggtggtctaccggcg

SEQ ID NO: 18390 - RNA, 75 nt, synthetic construct
  source 1..75: mol_type = other RNA
gactctggctttcccccaggtgtacatgttcctggtgaaatggcaggacctgtcggagaaggtggtctatagacg

SEQ ID NO: 18391 - RNA, 75 nt, synthetic construct
  source 1..75: mol_type = other RNA
gactctggctttcccccaggtgtacatgttcctggtgaaatggcaggacctgtcggagaaggtggtctataggcg

SEQ ID NO: 18392 - RNA, 75 nt, synthetic construct
  source 1..75: mol_type = other RNA
gactctggctttcccccaggtgtacatgttcctggtgaaatggcaggacctgtcggagaaggtggtctatcggcg

SEQ ID NO: 18393 - RNA, 75 nt, synthetic construct
  source 1..75: mol_type = other RNA
gactctggctttcccccaggtttacatgttcctggtgaaatggcaggacctgtcggagaaggtggtctacagacg

SEQ ID NO: 18394 - RNA, 75 nt, synthetic construct
  source 1..75: mol_type = other RNA
gactctggctttcccccaggtttacatgttcctggtgaaatggcaggacctgtcggagaaggtggtctacaggcg

SEQ ID NO: 18395 - RNA, 75 nt, synthetic construct
  source 1..75: mol_type = other RNA
gactctggctttcccccaggtttacatgttcctggtgaaatggcaggacctgtcggagaaggtggtctaccggcg

SEQ ID NO: 18396 - RNA, 75 nt, synthetic construct
  source 1..75: mol_type = other RNA
gactctggctttcccccaggtttacatgttcctggtgaaatggcaggacctgtcggagaaggtggtctatagacg

SEQ ID NO: 18397 - RNA, 75 nt, synthetic construct
  source 1..75: mol_type = other RNA
gactctggctttcccccaggtttacatgttcctggtgaaatggcaggacctgtcggagaaggtggtctataggcg

SEQ ID NO: 18398 - RNA, 75 nt, synthetic construct
  source 1..75: mol_type = other RNA
gactctggctttcccccaggtctacatgttcctggtgaaatggcaggacctgtcggagaaggtggtctatagacg

SEQ ID NO: 18399 - RNA, 75 nt, synthetic construct
  source 1..75: mol_type = other RNA
gactctggctttcccccaggtgtacatgttcctggtgaaatggcaggacctgtcggagaaggtggtctacagacg

SEQ ID NO: 18400 - RNA, 75 nt, synthetic construct
  source 1..75: mol_type = other RNA
gactctggctttcccccaggtgtacatgttcctggtgaaatggcaggacctgtcggagaaggtggtctacaggcg

SEQ ID NO: 18401 - RNA, 76 nt, synthetic construct
  source 1..76: mol_type = other RNA
cgactctggctttcccccaggtctacatgttcctggtgaaatggcaggacctgtcggagaaggtggtctatagacg

SEQ ID NO: 18402 - RNA, 76 nt, synthetic construct
  source 1..76: mol_type = other RNA
cgactctggctttcccccaggtgtacatgttcctggtgaaatggcaggacctgtcggagaaggtggtctacagacg

SEQ ID NO: 18403 - RNA, 76 nt, synthetic construct
  source 1..76: mol_type = other RNA
cgactctggctttcccccaggtttacatgttcctggtgaaatggcaggacctgtcggagaaggtggtctatcggcg

SEQ ID NO: 18404 - RNA, 76 nt, synthetic construct
  source 1..76: mol_type = other RNA
cgactctggctttcccccaggtttacatgttcctggtgaaatggcaggacctgtcggagaaggtggtctataggcg

SEQ ID NO: 18405 - RNA, 76 nt, synthetic construct
  source 1..76: mol_type = other RNA
cgactctggctttcccccaggtttacatgttcctggtgaaatggcaggacctgtcggagaaggtggtctatagacg

SEQ ID NO: 18406 - RNA, 76 nt, synthetic construct
  source 1..76: mol_type = other RNA
cgactctggctttcccccaggtttacatgttcctggtgaaatggcaggacctgtcggagaaggtggtctaccggcg

SEQ ID NO: 18407 - RNA, 76 nt, synthetic construct
  source 1..76: mol_type = other RNA
cgactctggctttcccccaggtttacatgttcctggtgaaatggcaggacctgtcggagaaggtggtctacaggcg

SEQ ID NO: 18408 - RNA, 76 nt, synthetic construct
  source 1..76: mol_type = other RNA
cgactctggctttcccccaggtttacatgttcctggtgaaatggcaggacctgtcggagaaggtggtctacagacg

SEQ ID NO: 18409 - RNA, 76 nt, synthetic construct
  source 1..76: mol_type = other RNA
cgactctggctttcccccaggtgtacatgttcctggtgaaatggcaggacctgtcggagaaggtggtctatcggcg

SEQ ID NO: 18410 - RNA, 76 nt, synthetic construct
  source 1..76: mol_type = other RNA
cgactctggctttcccccaggtgtacatgttcctggtgaaatggcaggacctgtcggagaaggtggtctacaggcg

SEQ ID NO: 18411 - RNA, 76 nt, synthetic construct
  source 1..76: mol_type = other RNA
cgactctggctttcccccaggtgtacatgttcctggtgaaatggcaggacctgtcggagaaggtggtctatagacg

SEQ ID NO: 18412 - RNA, 76 nt, synthetic construct
  source 1..76: mol_type = other RNA
cgactctggctttcccccaggtgtacatgttcctggtgaaatggcaggacctgtcggagaaggtggtctaccggcg

SEQ ID NO: 18413 - RNA, 76 nt, synthetic construct
  source 1..76: mol_type = other RNA
cgactctggctttcccccaggtatacatgttcctggtgaaatggcaggacctgtcggagaaggtggtctataggcg

SEQ ID NO: 18414 - RNA, 76 nt, synthetic construct
  source 1..76: mol_type = other RNA
cgactctggctttcccccaggtatacatgttcctggtgaaatggcaggacctgtcggagaaggtggtctacagacg

SEQ ID NO: 18415 - RNA, 76 nt, synthetic construct
  source 1..76: mol_type = other RNA
cgactctggctttcccccaggtatacatgttcctggtgaaatggcaggacctgtcggagaaggtggtctacaggcg

SEQ ID NO: 18416 - RNA, 76 nt, synthetic construct
  source 1..76: mol_type = other RNA
cgactctggctttcccccaggtatacatgttcctggtgaaatggcaggacctgtcggagaaggtggtctaccggcg

SEQ ID NO: 18417 - RNA, 76 nt, synthetic construct
  source 1..76: mol_type = other RNA
cgactctggctttcccccaggtatacatgttcctggtgaaatggcaggacctgtcggagaaggtggtctatagacg

SEQ ID NO: 18418 - RNA, 76 nt, synthetic construct
  source 1..76: mol_type = other RNA
cgactctggctttcccccaggtctacatgttcctggtgaaatggcaggacctgtcggagaaggtggtctataggcg

SEQ ID NO: 18419 - RNA, 76 nt, synthetic construct
  source 1..76: mol_type = other RNA
cgactctggctttcccccaggtatacatgttcctggtgaaatggcaggacctgtcggagaaggtggtctatcggcg

SEQ ID NO: 18420 - RNA, 76 nt, synthetic construct
  source 1..76: mol_type = other RNA
cgactctggctttcccccaggtctacatgttcctggtgaaatggcaggacctgtcggagaaggtggtctacaggcg

SEQ ID NO: 18421 - RNA, 76 nt, synthetic construct
  source 1..76: mol_type = other RNA
cgactctggctttcccccaggtctacatgttcctggtgaaatggcaggacctgtcggagaaggtggtctaccggcg

SEQ ID NO: 18422 - RNA, 76 nt, synthetic construct
  source 1..76: mol_type = other RNA
cgactctggctttcccccaggtctacatgttcctggtgaaatggcaggacctgtcggagaaggtggtctacagacg

SEQ ID NO: 18423 - RNA, 76 nt, synthetic construct
  source 1..76: mol_type = other RNA
cgactctggctttcccccaggtctacatgttcctggtgaaatggcaggacctgtcggagaaggtggtctatcggcg

SEQ ID NO: 18424 - RNA, 76 nt, synthetic construct
  source 1..76: mol_type = other RNA
cgactctggctttcccccaggtgtacatgttcctggtgaaatggcaggacctgtcggagaaggtggtctataggcg

SEQ ID NO: 18425 - RNA, 77 nt, synthetic construct
  source 1..77: mol_type = other RNA
ccgactctggctttcccccaggtatacatgttcctggtgaaatggcaggacctgtcggagaaggtggtctacaggcg

SEQ ID NO: 18426 - RNA, 77 nt, synthetic construct
  source 1..77: mol_type = other RNA
ccgactctggctttcccccaggtatacatgttcctggtgaaatggcaggacctgtcggagaaggtggtctaccggcg

SEQ ID NO: 18427 - RNA, 77 nt, synthetic construct
  source 1..77: mol_type = other RNA
ccgactctggctttcccccaggtatacatgttcctggtgaaatggcaggacctgtcggagaaggtggtctatagacg

SEQ ID NO: 18428 - RNA, 77 nt, synthetic construct
  source 1..77: mol_type = other RNA
ccgactctggctttcccccaggtatacatgttcctggtgaaatggcaggacctgtcggagaaggtggtctataggcg

SEQ ID NO: 18429 - RNA, 77 nt, synthetic construct
  source 1..77: mol_type = other RNA
ccgactctggctttcccccaggtatacatgttcctggtgaaatggcaggacctgtcggagaaggtggtctatcggcg

SEQ ID NO: 18430 - RNA, 77 nt, synthetic construct
  source 1..77: mol_type = other RNA
ccgactctggctttcccccaggtctacatgttcctggtgaaatggcaggacctgtcggagaaggtggtctacaggcg

SEQ ID NO: 18431 - RNA, 77 nt, synthetic construct
  source 1..77: mol_type = other RNA
ccgactctggctttcccccaggtctacatgttcctggtgaaatggcaggacctgtcggagaaggtggtctaccggcg

SEQ ID NO: 18432 - RNA, 77 nt, synthetic construct
  source 1..77: mol_type = other RNA
ccgactctggctttcccccaggtgtacatgttcctggtgaaatggcaggacctgtcggagaaggtggtctataggcg

SEQ ID NO: 18433 - RNA, 77 nt, synthetic construct
  source 1..77: mol_type = other RNA
ccgactctggctttcccccaggtctacatgttcctggtgaaatggcaggacctgtcggagaaggtggtctatagacg

SEQ ID NO: 18434 - RNA, 77 nt, synthetic construct
  source 1..77: mol_type = other RNA
ccgactctggctttcccccaggtgtacatgttcctggtgaaatggcaggacctgtcggagaaggtggtctacaggcg

SEQ ID NO: 18435 - RNA, 77 nt, synthetic construct
  source 1..77: mol_type = other RNA
ccgactctggctttcccccaggtgtacatgttcctggtgaaatggcaggacctgtcggagaaggtggtctaccggcg

SEQ ID NO: 18436 - RNA, 77 nt, synthetic construct
  source 1..77: mol_type = other RNA
ccgactctggctttcccccaggtgtacatgttcctggtgaaatggcaggacctgtcggagaaggtggtctatagacg

SEQ ID NO: 18437 - RNA, 77 nt, synthetic construct
  source 1..77: mol_type = other RNA
ccgactctggctttcccccaggtgtacatgttcctggtgaaatggcaggacctgtcggagaaggtggtctatcggcg

SEQ ID NO: 18438 - RNA, 77 nt, synthetic construct
  source 1..77: mol_type = other RNA
ccgactctggctttcccccaggtttacatgttcctggtgaaatggcaggacctgtcggagaaggtggtctacagacg

SEQ ID NO: 18439 - RNA, 77 nt, synthetic construct
  source 1..77: mol_type = other RNA
ccgactctggctttcccccaggtatacatgttcctggtgaaatggcaggacctgtcggagaaggtggtctacagacg

SEQ ID NO: 18440 - RNA, 77 nt, synthetic construct
  source 1..77: mol_type = other RNA
ccgactctggctttcccccaggtttacatgttcctggtgaaatggcaggacctgtcggagaaggtggtctacaggcg

SEQ ID NO: 18441 - RNA, 77 nt, synthetic construct
  source 1..77: mol_type = other RNA
ccgactctggctttcccccaggtttacatgttcctggtgaaatggcaggacctgtcggagaaggtggtctatagacg

SEQ ID NO: 18442 - RNA, 77 nt, synthetic construct
  source 1..77: mol_type = other RNA
ccgactctggctttcccccaggtttacatgttcctggtgaaatggcaggacctgtcggagaaggtggtctataggcg

SEQ ID NO: 18443 - RNA, 77 nt, synthetic construct
  source 1..77: mol_type = other RNA
ccgactctggctttcccccaggtttacatgttcctggtgaaatggcaggacctgtcggagaaggtggtctatcggcg

SEQ ID NO: 18444 - RNA, 77 nt, synthetic construct
  source 1..77: mol_type = other RNA
ccgactctggctttcccccaggtgtacatgttcctggtgaaatggcaggacctgtcggagaaggtggtctacagacg

SEQ ID NO: 18445 - RNA, 77 nt, synthetic construct
  source 1..77: mol_type = other RNA
ccgactctggctttcccccaggtttacatgttcctggtgaaatggcaggacctgtcggagaaggtggtctaccggcg

SEQ ID NO: 18446 - RNA, 77 nt, synthetic construct
  source 1..77: mol_type = other RNA
ccgactctggctttcccccaggtctacatgttcctggtgaaatggcaggacctgtcggagaaggtggtctataggcg

SEQ ID NO: 18447 - RNA, 77 nt, synthetic construct
  source 1..77: mol_type = other RNA
ccgactctggctttcccccaggtctacatgttcctggtgaaatggcaggacctgtcggagaaggtggtctatcggcg

SEQ ID NO: 18448 - RNA, 77 nt, synthetic construct
  source 1..77: mol_type = other RNA
ccgactctggctttcccccaggtctacatgttcctggtgaaatggcaggacctgtcggagaaggtggtctacagacg

SEQ ID NO: 18449 - RNA, 78 nt, synthetic construct
  source 1..78: mol_type = other RNA
cccgactctggctttcccccaggtctacatgttcctggtgaaatggcaggacctgtcggagaaggtggtctatcggcg

SEQ ID NO: 18450 - RNA, 78 nt, synthetic construct
  source 1..78: mol_type = other RNA
cccgactctggctttcccccaggtatacatgttcctggtgaaatggcaggacctgtcggagaaggtggtctacagacg

SEQ ID NO: 18451 - RNA, 78 nt, synthetic construct
  source 1..78: mol_type = other RNA
cccgactctggctttcccccaggtatacatgttcctggtgaaatggcaggacctgtcggagaaggtggtctacaggcg

SEQ ID NO: 18452 - RNA, 78 nt, synthetic construct
  source 1..78: mol_type = other RNA
cccgactctggctttcccccaggtatacatgttcctggtgaaatggcaggacctgtcggagaaggtggtctatagacg

SEQ ID NO: 18453 - RNA, 78 nt, synthetic construct
  source 1..78: mol_type = other RNA
cccgactctggctttcccccaggtatacatgttcctggtgaaatggcaggacctgtcggagaaggtggtctataggcg

SEQ ID NO: 18454 - RNA, 78 nt, synthetic construct
  source 1..78: mol_type = other RNA
cccgactctggctttcccccaggtatacatgttcctggtgaaatggcaggacctgtcggagaaggtggtctatcggcg

SEQ ID NO: 18455 - RNA, 78 nt, synthetic construct
  source 1..78: mol_type = other RNA
cccgactctggctttcccccaggtctacatgttcctggtgaaatggcaggacctgtcggagaaggtggtctacagacg

SEQ ID NO: 18456 - RNA, 78 nt, synthetic construct
  source 1..78: mol_type = other RNA
cccgactctggctttcccccaggtctacatgttcctggtgaaatggcaggacctgtcggagaaggtggtctacaggcg

SEQ ID NO: 18457 - RNA, 78 nt, synthetic construct
  source 1..78: mol_type = other RNA
cccgactctggctttcccccaggtctacatgttcctggtgaaatggcaggacctgtcggagaaggtggtctaccggcg

SEQ ID NO: 18458 - RNA, 78 nt, synthetic construct
  source 1..78: mol_type = other RNA
cccgactctggctttcccccaggtctacatgttcctggtgaaatggcaggacctgtcggagaaggtggtctatagacg

SEQ ID NO: 18459 - RNA, 78 nt, synthetic construct
  source 1..78: mol_type = other RNA
cccgactctggctttcccccaggtatacatgttcctggtgaaatggcaggacctgtcggagaaggtggtctaccggcg

SEQ ID NO: 18460 - RNA, 78 nt, synthetic construct
  source 1..78: mol_type = other RNA
cccgactctggctttcccccaggtttacatgttcctggtgaaatggcaggacctgtcggagaaggtggtctatcggcg

SEQ ID NO: 18461 - RNA, 78 nt, synthetic construct
  source 1..78: mol_type = other RNA
cccgactctggctttcccccaggtttacatgttcctggtgaaatggcaggacctgtcggagaaggtggtctataggcg

SEQ ID NO: 18462 - RNA, 78 nt, synthetic construct
  source 1..78: mol_type = other RNA
cccgactctggctttcccccaggtgtacatgttcctggtgaaatggcaggacctgtcggagaaggtggtctacagacg

SEQ ID NO: 18463 - RNA, 78 nt, synthetic construct
  source 1..78: mol_type = other RNA
cccgactctggctttcccccaggtctacatgttcctggtgaaatggcaggacctgtcggagaaggtggtctataggcg

SEQ ID NO: 18464 - RNA, 78 nt, synthetic construct
  source 1..78: mol_type = other RNA
cccgactctggctttcccccaggtttacatgttcctggtgaaatggcaggacctgtcggagaaggtggtctaccggcg

SEQ ID NO: 18465 - RNA, 78 nt, synthetic construct
  source 1..78: mol_type = other RNA
cccgactctggctttcccccaggtttacatgttcctggtgaaatggcaggacctgtcggagaaggtggtctacaggcg

SEQ ID NO: 18466 - RNA, 78 nt, synthetic construct
  source 1..78: mol_type = other RNA
cccgactctggctttcccccaggtgtacatgttcctggtgaaatggcaggacctgtcggagaaggtggtctatcggcg

SEQ ID NO: 18467 - RNA, 78 nt, synthetic construct
  source 1..78: mol_type = other RNA
cccgactctggctttcccccaggtttacatgttcctggtgaaatggcaggacctgtcggagaaggtggtctacagacg

SEQ ID NO: 18468 - RNA, 78 nt, synthetic construct
  source 1..78: mol_type = other RNA
cccgactctggctttcccccaggtgtacatgttcctggtgaaatggcaggacctgtcggagaaggtggtctatagacg

SEQ ID NO: 18469 - RNA, 78 nt, synthetic construct
  source 1..78: mol_type = other RNA
cccgactctggctttcccccaggtgtacatgttcctggtgaaatggcaggacctgtcggagaaggtggtctaccggcg

SEQ ID NO: 18470 - RNA, 78 nt, synthetic construct
  source 1..78: mol_type = other RNA
cccgactctggctttcccccaggtgtacatgttcctggtgaaatggcaggacctgtcggagaaggtggtctacaggcg

SEQ ID NO: 18471 - RNA, 78 nt, synthetic construct
  source 1..78: mol_type = other RNA
cccgactctggctttcccccaggtttacatgttcctggtgaaatggcaggacctgtcggagaaggtggtctatagacg

SEQ ID NO: 18472 - RNA, 78 nt, synthetic construct
  source 1..78: mol_type = other RNA
cccgactctggctttcccccaggtgtacatgttcctggtgaaatggcaggacctgtcggagaaggtggtctataggcg

SEQ ID NO: 18473 - RNA, 79 nt, synthetic construct
  source 1..79: mol_type = other RNA
ccccgactctggctttcccccaggtgtacatgttcctggtgaaatggcaggacctgtcggagaaggtggtctatagacg

SEQ ID NO: 18474 - RNA, 79 nt, synthetic construct
  source 1..79: mol_type = other RNA
ccccgactctggctttcccccaggtgtacatgttcctggtgaaatggcaggacctgtcggagaaggtggtctaccggcg

SEQ ID NO: 18475 - RNA, 79 nt, synthetic construct
  source 1..79: mol_type = other RNA
ccccgactctggctttcccccaggtttacatgttcctggtgaaatggcaggacctgtcggagaaggtggtctaccggcg

SEQ ID NO: 18476 - RNA, 79 nt, synthetic construct
  source 1..79: mol_type = other RNA
ccccgactctggctttcccccaggtgtacatgttcctggtgaaatggcaggacctgtcggagaaggtggtctataggcg

SEQ ID NO: 18477 - RNA, 79 nt, synthetic construct
  source 1..79: mol_type = other RNA
ccccgactctggctttcccccaggtgtacatgttcctggtgaaatggcaggacctgtcggagaaggtggtctatcggcg

SEQ ID NO: 18478 - RNA, 79 nt, synthetic construct
  source 1..79: mol_type = other RNA
ccccgactctggctttcccccaggtgtacatgttcctggtgaaatggcaggacctgtcggagaaggtggtctacagacg

SEQ ID NO: 18479 - RNA, 79 nt, synthetic construct
  source 1..79: mol_type = other RNA
ccccgactctggctttcccccaggtctacatgttcctggtgaaatggcaggacctgtcggagaaggtggtctatcggcg

SEQ ID NO: 18480 - RNA, 79 nt, synthetic construct
  source 1..79: mol_type = other RNA
ccccgactctggctttcccccaggtttacatgttcctggtgaaatggcaggacctgtcggagaaggtggtctacagacg

SEQ ID NO: 18481 - RNA, 79 nt, synthetic construct
  source 1..79: mol_type = other RNA
ccccgactctggctttcccccaggtctacatgttcctggtgaaatggcaggacctgtcggagaaggtggtctatagacg

SEQ ID NO: 18482 - RNA, 79 nt, synthetic construct
  source 1..79: mol_type = other RNA
ccccgactctggctttcccccaggtttacatgttcctggtgaaatggcaggacctgtcggagaaggtggtctatagacg

SEQ ID NO: 18483 - RNA, 79 nt, synthetic construct
  source 1..79: mol_type = other RNA
ccccgactctggctttcccccaggtatacatgttcctggtgaaatggcaggacctgtcggagaaggtggtctataggcg

SEQ ID NO: 18484 - RNA, 79 nt, synthetic construct
  source 1..79: mol_type = other RNA
ccccgactctggctttcccccaggtatacatgttcctggtgaaatggcaggacctgtcggagaaggtggtctatagacg

SEQ ID NO: 18485 - RNA, 79 nt, synthetic construct
  source 1..79: mol_type = other RNA
ccccgactctggctttcccccaggtatacatgttcctggtgaaatggcaggacctgtcggagaaggtggtctaccggcg

SEQ ID NO: 18486 - RNA, 79 nt, synthetic construct
  source 1..79: mol_type = other RNA
ccccgactctggctttcccccaggtatacatgttcctggtgaaatggcaggacctgtcggagaaggtggtctacagacg

SEQ ID NO: 18487 - RNA, 79 nt, synthetic construct
  source 1..79: mol_type = other RNA
ccccgactctggctttcccccaggtatacatgttcctggtgaaatggcaggacctgtcggagaaggtggtctatcggcg

SEQ ID NO: 18488 - RNA, 79 nt, synthetic construct
  source 1..79: mol_type = other RNA
ccccgactctggctttcccccaggtctacatgttcctggtgaaatggcaggacctgtcggagaaggtggtctacagacg

SEQ ID NO: 18489 - RNA, 79 nt, synthetic construct
  source 1..79: mol_type = other RNA
ccccgactctggctttcccccaggtctacatgttcctggtgaaatggcaggacctgtcggagaaggtggtctacaggcg

SEQ ID NO: 18490 - RNA, 79 nt, synthetic construct
  source 1..79: mol_type = other RNA
ccccgactctggctttcccccaggtctacatgttcctggtgaaatggcaggacctgtcggagaaggtggtctaccggcg

SEQ ID NO: 18491 - RNA, 79 nt, synthetic construct
  source 1..79: mol_type = other RNA
ccccgactctggctttcccccaggtttacatgttcctggtgaaatggcaggacctgtcggagaaggtggtctatcggcg

SEQ ID NO: 18492 - RNA, 79 nt, synthetic construct
  source 1..79: mol_type = other RNA
ccccgactctggctttcccccaggtttacatgttcctggtgaaatggcaggacctgtcggagaaggtggtctataggcg

SEQ ID NO: 18493 - RNA, 79 nt, synthetic construct
  source 1..79: mol_type = other RNA
ccccgactctggctttcccccaggtatacatgttcctggtgaaatggcaggacctgtcggagaaggtggtctacaggcg

SEQ ID NO: 18494 - RNA, 79 nt, synthetic construct
  source 1..79: mol_type = other RNA
ccccgactctggctttcccccaggtttacatgttcctggtgaaatggcaggacctgtcggagaaggtggtctacaggcg

SEQ ID NO: 18495 - RNA, 79 nt, synthetic construct
  source 1..79: mol_type = other RNA
ccccgactctggctttcccccaggtgtacatgttcctggtgaaatggcaggacctgtcggagaaggtggtctacaggcg

SEQ ID NO: 18496 - RNA, 79 nt, synthetic construct
  source 1..79: mol_type = other RNA
ccccgactctggctttcccccaggtctacatgttcctggtgaaatggcaggacctgtcggagaaggtggtctataggcg

SEQ ID NO: 18497 - RNA, 80 nt, synthetic construct
  source 1..80: mol_type = other RNA
cccccgactctggctttcccccaggtttacatgttcctggtgaaatggcaggacctgtcggagaaggtggtctacagacg

SEQ ID NO: 18498 - RNA, 80 nt, synthetic construct
  source 1..80: mol_type = other RNA
cccccgactctggctttcccccaggtttacatgttcctggtgaaatggcaggacctgtcggagaaggtggtctatagacg

SEQ ID NO: 18499 - RNA, 80 nt, synthetic construct
  source 1..80: mol_type = other RNA
cccccgactctggctttcccccaggtttacatgttcctggtgaaatggcaggacctgtcggagaaggtggtctaccggcg

SEQ ID NO: 18500 - RNA, 80 nt, synthetic construct
  source 1..80: mol_type = other RNA
cccccgactctggctttcccccaggtttacatgttcctggtgaaatggcaggacctgtcggagaaggtggtctataggcg

SEQ ID NO: 18501 - RNA, 80 nt, synthetic construct
  source 1..80: mol_type = other RNA
cccccgactctggctttcccccaggtttacatgttcctggtgaaatggcaggacctgtcggagaaggtggtctatcggcg

SEQ ID NO: 18502 - RNA, 80 nt, synthetic construct
  source 1..80: mol_type = other RNA
cccccgactctggctttcccccaggtgtacatgttcctggtgaaatggcaggacctgtcggagaaggtggtctacagacg

SEQ ID NO: 18503 - RNA, 80 nt, synthetic construct
  source 1..80: mol_type = other RNA
cccccgactctggctttcccccaggtgtacatgttcctggtgaaatggcaggacctgtcggagaaggtggtctaccggcg

SEQ ID NO: 18504 - RNA, 80 nt, synthetic construct
  source 1..80: mol_type = other RNA
cccccgactctggctttcccccaggtctacatgttcctggtgaaatggcaggacctgtcggagaaggtggtctatcggcg

SEQ ID NO: 18505 - RNA, 80 nt, synthetic construct
  source 1..80: mol_type = other RNA
cccccgactctggctttcccccaggtctacatgttcctggtgaaatggcaggacctgtcggagaaggtggtctatagacg

SEQ ID NO: 18506 - RNA, 80 nt, synthetic construct
  source 1..80: mol_type = other RNA
cccccgactctggctttcccccaggtctacatgttcctggtgaaatggcaggacctgtcggagaaggtggtctataggcg

SEQ ID NO: 18507 - RNA, 80 nt, synthetic construct
  source 1..80: mol_type = other RNA
cccccgactctggctttcccccaggtatacatgttcctggtgaaatggcaggacctgtcggagaaggtggtctacaggcg

SEQ ID NO: 18508 - RNA, 80 nt, synthetic construct
  source 1..80: mol_type = other RNA
cccccgactctggctttcccccaggtatacatgttcctggtgaaatggcaggacctgtcggagaaggtggtctatagacg

SEQ ID NO: 18509 - RNA, 80 nt, synthetic construct
  source 1..80: mol_type = other RNA
cccccgactctggctttcccccaggtatacatgttcctggtgaaatggcaggacctgtcggagaaggtggtctataggcg

SEQ ID NO: 18510 - RNA, 80 nt, synthetic construct
  source 1..80: mol_type = other RNA
cccccgactctggctttcccccaggtatacatgttcctggtgaaatggcaggacctgtcggagaaggtggtctacagacg

SEQ ID NO: 18511 - RNA, 80 nt, synthetic construct
  source 1..80: mol_type = other RNA
cccccgactctggctttcccccaggtctacatgttcctggtgaaatggcaggacctgtcggagaaggtggtctacagacg

SEQ ID NO: 18512 - RNA, 80 nt, synthetic construct
  source 1..80: mol_type = other RNA
cccccgactctggctttcccccaggtgtacatgttcctggtgaaatggcaggacctgtcggagaaggtggtctatcggcg

SEQ ID NO: 18513 - RNA, 80 nt, synthetic construct
  source 1..80: mol_type = other RNA
cccccgactctggctttcccccaggtctacatgttcctggtgaaatggcaggacctgtcggagaaggtggtctacaggcg

SEQ ID NO: 18514 - RNA, 80 nt, synthetic construct
  source 1..80: mol_type = other RNA
cccccgactctggctttcccccaggtgtacatgttcctggtgaaatggcaggacctgtcggagaaggtggtctataggcg

SEQ ID NO: 18515 - RNA, 80 nt, synthetic construct
  source 1..80: mol_type = other RNA
cccccgactctggctttcccccaggtgtacatgttcctggtgaaatggcaggacctgtcggagaaggtggtctacaggcg

SEQ ID NO: 18516 - RNA, 80 nt, synthetic construct
  source 1..80: mol_type = other RNA
cccccgactctggctttcccccaggtttacatgttcctggtgaaatggcaggacctgtcggagaaggtggtctacaggcg

SEQ ID NO: 18517 - RNA, 80 nt, synthetic construct
  source 1..80: mol_type = other RNA
cccccgactctggctttcccccaggtgtacatgttcctggtgaaatggcaggacctgtcggagaaggtggtctatagacg

SEQ ID NO: 18518 - RNA, 80 nt, synthetic construct
  source 1..80: mol_type = other RNA
cccccgactctggctttcccccaggtctacatgttcctggtgaaatggcaggacctgtcggagaaggtggtctaccggcg

SEQ ID NO: 18519 - RNA, 80 nt, synthetic construct
  source 1..80: mol_type = other RNA
cccccgactctggctttcccccaggtatacatgttcctggtgaaatggcaggacctgtcggagaaggtggtctatcggcg

SEQ ID NO: 18520 - RNA, 80 nt, synthetic construct
  source 1..80: mol_type = other RNA
cccccgactctggctttcccccaggtatacatgttcctggtgaaatggcaggacctgtcggagaaggtggtctaccggcg

SEQ ID NO: 18521 - RNA, 81 nt, synthetic construct
  source 1..81: mol_type = other RNA
tcccccgactctggctttcccccaggtctacatgttcctggtgaaatggcaggacctgtcggagaaggtggtctataggcg

SEQ ID NO: 18522 - RNA, 81 nt, synthetic construct
  source 1..81: mol_type = other RNA
tcccccgactctggctttcccccaggtctacatgttcctggtgaaatggcaggacctgtcggagaaggtggtctaccggcg

SEQ ID NO: 18523 - RNA, 81 nt, synthetic construct
  source 1..81: mol_type = other RNA
tcccccgactctggctttcccccaggtctacatgttcctggtgaaatggcaggacctgtcggagaaggtggtctacaggcg

SEQ ID NO: 18524 - RNA, 81 nt, synthetic construct
  source 1..81: mol_type = other RNA
tcccccgactctggctttcccccaggtgtacatgttcctggtgaaatggcaggacctgtcggagaaggtggtctaccggcg

SEQ ID NO: 18525 - RNA, 81 nt, synthetic construct
  source 1..81: mol_type = other RNA
tcccccgactctggctttcccccaggtctacatgttcctggtgaaatggcaggacctgtcggagaaggtggtctacagacg

SEQ ID NO: 18526 - RNA, 81 nt, synthetic construct
  source 1..81: mol_type = other RNA
tcccccgactctggctttcccccaggtgtacatgttcctggtgaaatggcaggacctgtcggagaaggtggtctacaggcg

SEQ ID NO: 18527 - RNA, 81 nt, synthetic construct
  source 1..81: mol_type = other RNA
tcccccgactctggctttcccccaggtctacatgttcctggtgaaatggcaggacctgtcggagaaggtggtctatagacg

SEQ ID NO: 18528 - RNA, 81 nt, synthetic construct
  source 1..81: mol_type = other RNA
tcccccgactctggctttcccccaggtgtacatgttcctggtgaaatggcaggacctgtcggagaaggtggtctatagacg

SEQ ID NO: 18529 - RNA, 81 nt, synthetic construct
  source 1..81: mol_type = other RNA
tcccccgactctggctttcccccaggtatacatgttcctggtgaaatggcaggacctgtcggagaaggtggtctatcggcg

SEQ ID NO: 18530 - RNA, 81 nt, synthetic construct
  source 1..81: mol_type = other RNA
tcccccgactctggctttcccccaggtatacatgttcctggtgaaatggcaggacctgtcggagaaggtggtctacagacg

SEQ ID NO: 18531 - RNA, 81 nt, synthetic construct
  source 1..81: mol_type = other RNA
tcccccgactctggctttcccccaggtatacatgttcctggtgaaatggcaggacctgtcggagaaggtggtctaccggcg

SEQ ID NO: 18532 - RNA, 81 nt, synthetic construct
  source 1..81: mol_type = other RNA
tcccccgactctggctttcccccaggtatacatgttcctggtgaaatggcaggacctgtcggagaaggtggtctatagacg

SEQ ID NO: 18533 - RNA, 81 nt, synthetic construct
  source 1..81: mol_type = other RNA
tcccccgactctggctttcccccaggtatacatgttcctggtgaaatggcaggacctgtcggagaaggtggtctataggcg

SEQ ID NO: 18534 - RNA, 81 nt, synthetic construct
  source 1..81: mol_type = other RNA
tcccccgactctggctttcccccaggtatacatgttcctggtgaaatggcaggacctgtcggagaaggtggtctacaggcg

SEQ ID NO: 18535 - RNA, 81 nt, synthetic construct
  source 1..81: mol_type = other RNA
tcccccgactctggctttcccccaggtctacatgttcctggtgaaatggcaggacctgtcggagaaggtggtctatcggcg

SEQ ID NO: 18536 - RNA, 81 nt, synthetic construct
  source 1..81: mol_type = other RNA
tcccccgactctggctttcccccaggtttacatgttcctggtgaaatggcaggacctgtcggagaaggtggtctataggcg

SEQ ID NO: 18537 - RNA, 81 nt, synthetic construct
  source 1..81: mol_type = other RNA
tcccccgactctggctttcccccaggtttacatgttcctggtgaaatggcaggacctgtcggagaaggtggtctatagacg

SEQ ID NO: 18538 - RNA, 81 nt, synthetic construct
  source 1..81: mol_type = other RNA
tcccccgactctggctttcccccaggtttacatgttcctggtgaaatggcaggacctgtcggagaaggtggtctaccggcg

SEQ ID NO: 18539 - RNA, 81 nt, synthetic construct
  source 1..81: mol_type = other RNA
tcccccgactctggctttcccccaggtttacatgttcctggtgaaatggcaggacctgtcggagaaggtggtctacaggcg

SEQ ID NO: 18540 - RNA, 81 nt, synthetic construct
  source 1..81: mol_type = other RNA
tcccccgactctggctttcccccaggtgtacatgttcctggtgaaatggcaggacctgtcggagaaggtggtctacagacg

SEQ ID NO: 18541 - RNA, 81 nt, synthetic construct
  source 1..81: mol_type = other RNA
tcccccgactctggctttcccccaggtgtacatgttcctggtgaaatggcaggacctgtcggagaaggtggtctataggcg

SEQ ID NO: 18542 - RNA, 81 nt, synthetic construct
  source 1..81: mol_type = other RNA
tcccccgactctggctttcccccaggtgtacatgttcctggtgaaatggcaggacctgtcggagaaggtggtctatcggcg

SEQ ID NO: 18543 - RNA, 81 nt, synthetic construct
  source 1..81: mol_type = other RNA
tcccccgactctggctttcccccaggtttacatgttcctggtgaaatggcaggacctgtcggagaaggtggtctacagacg

SEQ ID NO: 18544 - RNA, 81 nt, synthetic construct
  source 1..81: mol_type = other RNA
tcccccgactctggctttcccccaggtttacatgttcctggtgaaatggcaggacctgtcggagaaggtggtctatcggcg

SEQ ID NO: 18545 - RNA, 82 nt, synthetic construct
  source 1..82: mol_type = other RNA
gtcccccgactctggctttcccccaggtctacatgttcctggtgaaatggcaggacctgtcggagaaggtggtctatagacg

SEQ ID NO: 18546 - RNA, 82 nt, synthetic construct
  source 1..82: mol_type = other RNA
gtcccccgactctggctttcccccaggtctacatgttcctggtgaaatggcaggacctgtcggagaaggtggtctaccggcg

SEQ ID NO: 18547 - RNA, 82 nt, synthetic construct
  source 1..82: mol_type = other RNA
gtcccccgactctggctttcccccaggtctacatgttcctggtgaaatggcaggacctgtcggagaaggtggtctacaggcg

SEQ ID NO: 18548 - RNA, 82 nt, synthetic construct
  source 1..82: mol_type = other RNA
gtcccccgactctggctttcccccaggtctacatgttcctggtgaaatggcaggacctgtcggagaaggtggtctacagacg

SEQ ID NO: 18549 - RNA, 82 nt, synthetic construct
  source 1..82: mol_type = other RNA
gtcccccgactctggctttcccccaggtatacatgttcctggtgaaatggcaggacctgtcggagaaggtggtctatcggcg

SEQ ID NO: 18550 - RNA, 82 nt, synthetic construct
  source 1..82: mol_type = other RNA
gtcccccgactctggctttcccccaggtatacatgttcctggtgaaatggcaggacctgtcggagaaggtggtctataggcg

SEQ ID NO: 18551 - RNA, 82 nt, synthetic construct
  source 1..82: mol_type = other RNA
gtcccccgactctggctttcccccaggtatacatgttcctggtgaaatggcaggacctgtcggagaaggtggtctatagacg

SEQ ID NO: 18552 - RNA, 82 nt, synthetic construct
  source 1..82: mol_type = other RNA
gtcccccgactctggctttcccccaggtatacatgttcctggtgaaatggcaggacctgtcggagaaggtggtctaccggcg

SEQ ID NO: 18553 - RNA, 82 nt, synthetic construct
  source 1..82: mol_type = other RNA
gtcccccgactctggctttcccccaggtatacatgttcctggtgaaatggcaggacctgtcggagaaggtggtctacagacg

SEQ ID NO: 18554 - RNA, 82 nt, synthetic construct
  source 1..82: mol_type = other RNA
gtcccccgactctggctttcccccaggtctacatgttcctggtgaaatggcaggacctgtcggagaaggtggtctataggcg

SEQ ID NO: 18555 - RNA, 82 nt, synthetic construct
  source 1..82: mol_type = other RNA
gtcccccgactctggctttcccccaggtgtacatgttcctggtgaaatggcaggacctgtcggagaaggtggtctacagacg

SEQ ID NO: 18556 - RNA, 82 nt, synthetic construct
  source 1..82: mol_type = other RNA
gtcccccgactctggctttcccccaggtttacatgttcctggtgaaatggcaggacctgtcggagaaggtggtctaccggcg

SEQ ID NO: 18557 - RNA, 82 nt, synthetic construct
  source 1..82: mol_type = other RNA
gtcccccgactctggctttcccccaggtgtacatgttcctggtgaaatggcaggacctgtcggagaaggtggtctatcggcg

SEQ ID NO: 18558 - RNA, 82 nt, synthetic construct
  source 1..82: mol_type = other RNA
gtcccccgactctggctttcccccaggtctacatgttcctggtgaaatggcaggacctgtcggagaaggtggtctatcggcg

SEQ ID NO: 18559 - RNA, 82 nt, synthetic construct
  source 1..82: mol_type = other RNA
gtcccccgactctggctttcccccaggtgtacatgttcctggtgaaatggcaggacctgtcggagaaggtggtctatagacg

SEQ ID NO: 18560 - RNA, 82 nt, synthetic construct
  source 1..82: mol_type = other RNA
gtcccccgactctggctttcccccaggtgtacatgttcctggtgaaatggcaggacctgtcggagaaggtggtctataggcg

SEQ ID NO: 18561 - RNA, 82 nt, synthetic construct
  source 1..82: mol_type = other RNA
gtcccccgactctggctttcccccaggtgtacatgttcctggtgaaatggcaggacctgtcggagaaggtggtctaccggcg

SEQ ID NO: 18562 - RNA, 82 nt, synthetic construct
  source 1..82: mol_type = other RNA
gtcccccgactctggctttcccccaggtttacatgttcctggtgaaatggcaggacctgtcggagaaggtggtctatcggcg

SEQ ID NO: 18563 - RNA, 82 nt, synthetic construct
  source 1..82: mol_type = other RNA
gtcccccgactctggctttcccccaggtttacatgttcctggtgaaatggcaggacctgtcggagaaggtggtctataggcg

SEQ ID NO: 18564 - RNA, 82 nt, synthetic construct
  source 1..82: mol_type = other RNA
gtcccccgactctggctttcccccaggtttacatgttcctggtgaaatggcaggacctgtcggagaaggtggtctatagacg

SEQ ID NO: 18565 - RNA, 82 nt, synthetic construct
  source 1..82: mol_type = other RNA
gtcccccgactctggctttcccccaggtatacatgttcctggtgaaatggcaggacctgtcggagaaggtggtctacaggcg

SEQ ID NO: 18566 - RNA, 82 nt, synthetic construct
  source 1..82: mol_type = other RNA
gtcccccgactctggctttcccccaggtttacatgttcctggtgaaatggcaggacctgtcggagaaggtggtctacaggcg

SEQ ID NO: 18567 - RNA, 82 nt, synthetic construct
  source 1..82: mol_type = other RNA
gtcccccgactctggctttcccccaggtttacatgttcctggtgaaatggcaggacctgtcggagaaggtggtctacagacg

SEQ ID NO: 18568 - RNA, 82 nt, synthetic construct
  source 1..82: mol_type = other RNA
gtcccccgactctggctttcccccaggtgtacatgttcctggtgaaatggcaggacctgtcggagaaggtggtctacaggcg

SEQ ID NO: 18569 - RNA, 83 nt, synthetic construct
  source 1..83: mol_type = other RNA
ggtcccccgactctggctttcccccaggtgtacatgttcctggtgaaatggcaggacctgtcggagaaggtggtctacagacg

SEQ ID NO: 18570 - RNA, 83 nt, synthetic construct
  source 1..83: mol_type = other RNA
ggtcccccgactctggctttcccccaggtttacatgttcctggtgaaatggcaggacctgtcggagaaggtggtctacagacg

SEQ ID NO: 18571 - RNA, 83 nt, synthetic construct
  source 1..83: mol_type = other RNA
ggtcccccgactctggctttcccccaggtttacatgttcctggtgaaatggcaggacctgtcggagaaggtggtctatcggcg

SEQ ID NO: 18572 - RNA, 83 nt, synthetic construct
  source 1..83: mol_type = other RNA
ggtcccccgactctggctttcccccaggtttacatgttcctggtgaaatggcaggacctgtcggagaaggtggtctaccggcg

SEQ ID NO: 18573 - RNA, 83 nt, synthetic construct
  source 1..83: mol_type = other RNA
ggtcccccgactctggctttcccccaggtttacatgttcctggtgaaatggcaggacctgtcggagaaggtggtctatagacg

SEQ ID NO: 18574 - RNA, 83 nt, synthetic construct
  source 1..83: mol_type = other RNA
ggtcccccgactctggctttcccccaggtttacatgttcctggtgaaatggcaggacctgtcggagaaggtggtctataggcg

SEQ ID NO: 18575 - RNA, 83 nt, synthetic construct
  source 1..83: mol_type = other RNA
ggtcccccgactctggctttcccccaggtgtacatgttcctggtgaaatggcaggacctgtcggagaaggtggtctaccggcg

SEQ ID NO: 18576 - RNA, 83 nt, synthetic construct
  source 1..83: mol_type = other RNA
ggtcccccgactctggctttcccccaggtttacatgttcctggtgaaatggcaggacctgtcggagaaggtggtctacaggcg

SEQ ID NO: 18577 - RNA, 83 nt, synthetic construct
  source 1..83: mol_type = other RNA
ggtcccccgactctggctttcccccaggtgtacatgttcctggtgaaatggcaggacctgtcggagaaggtggtctacaggcg

SEQ ID NO: 18578 - RNA, 83 nt, synthetic construct
  source 1..83: mol_type = other RNA
ggtcccccgactctggctttcccccaggtgtacatgttcctggtgaaatggcaggacctgtcggagaaggtggtctatcggcg

SEQ ID NO: 18579 - RNA, 83 nt, synthetic construct
  source 1..83: mol_type = other RNA
ggtcccccgactctggctttcccccaggtctacatgttcctggtgaaatggcaggacctgtcggagaaggtggtctatcggcg

SEQ ID NO: 18580 - RNA, 83 nt, synthetic construct
  source 1..83: mol_type = other RNA
ggtcccccgactctggctttcccccaggtatacatgttcctggtgaaatggcaggacctgtcggagaaggtggtctaccggcg

SEQ ID NO: 18581 - RNA, 83 nt, synthetic construct
  source 1..83: mol_type = other RNA
ggtcccccgactctggctttcccccaggtatacatgttcctggtgaaatggcaggacctgtcggagaaggtggtctacagacg

SEQ ID NO: 18582 - RNA, 83 nt, synthetic construct
  source 1..83: mol_type = other RNA
ggtcccccgactctggctttcccccaggtatacatgttcctggtgaaatggcaggacctgtcggagaaggtggtctacaggcg

SEQ ID NO: 18583 - RNA, 83 nt, synthetic construct
  source 1..83: mol_type = other RNA
ggtcccccgactctggctttcccccaggtatacatgttcctggtgaaatggcaggacctgtcggagaaggtggtctatagacg

SEQ ID NO: 18584 - RNA, 83 nt, synthetic construct
  source 1..83: mol_type = other RNA
ggtcccccgactctggctttcccccaggtatacatgttcctggtgaaatggcaggacctgtcggagaaggtggtctataggcg

SEQ ID NO: 18585 - RNA, 83 nt, synthetic construct
  source 1..83: mol_type = other RNA
ggtcccccgactctggctttcccccaggtgtacatgttcctggtgaaatggcaggacctgtcggagaaggtggtctataggcg

SEQ ID NO: 18586 - RNA, 83 nt, synthetic construct
  source 1..83: mol_type = other RNA
ggtcccccgactctggctttcccccaggtctacatgttcctggtgaaatggcaggacctgtcggagaaggtggtctacagacg

SEQ ID NO: 18587 - RNA, 83 nt, synthetic construct
  source 1..83: mol_type = other RNA
ggtcccccgactctggctttcccccaggtctacatgttcctggtgaaatggcaggacctgtcggagaaggtggtctacaggcg

SEQ ID NO: 18588 - RNA, 83 nt, synthetic construct
  source 1..83: mol_type = other RNA
ggtcccccgactctggctttcccccaggtctacatgttcctggtgaaatggcaggacctgtcggagaaggtggtctaccggcg

SEQ ID NO: 18589 - RNA, 83 nt, synthetic construct
  source 1..83: mol_type = other RNA
ggtcccccgactctggctttcccccaggtctacatgttcctggtgaaatggcaggacctgtcggagaaggtggtctatagacg

SEQ ID NO: 18590 - RNA, 83 nt, synthetic construct
  source 1..83: mol_type = other RNA
ggtcccccgactctggctttcccccaggtctacatgttcctggtgaaatggcaggacctgtcggagaaggtggtctataggcg

SEQ ID NO: 18591 - RNA, 83 nt, synthetic construct
  source 1..83: mol_type = other RNA
ggtcccccgactctggctttcccccaggtatacatgttcctggtgaaatggcaggacctgtcggagaaggtggtctatcggcg

SEQ ID NO: 18592 - RNA, 83 nt, synthetic construct
  source 1..83: mol_type = other RNA
ggtcccccgactctggctttcccccaggtgtacatgttcctggtgaaatggcaggacctgtcggagaaggtggtctatagacg

SEQ ID NO: 18593 - RNA, 84 nt, synthetic construct
  source 1..84: mol_type = other RNA
gggtcccccgactctggctttcccccaggtttacatgttcctggtgaaatggcaggacctgtcggagaaggtggtctatcggcg

SEQ ID NO: 18594 - RNA, 84 nt, synthetic construct
  source 1..84: mol_type = other RNA
gggtcccccgactctggctttcccccaggtatacatgttcctggtgaaatggcaggacctgtcggagaaggtggtctatagacg

SEQ ID NO: 18595 - RNA, 84 nt, synthetic construct
  source 1..84: mol_type = other RNA
gggtcccccgactctggctttcccccaggtttacatgttcctggtgaaatggcaggacctgtcggagaaggtggtctacaggcg

SEQ ID NO: 18596 - RNA, 84 nt, synthetic construct
  source 1..84: mol_type = other RNA
gggtcccccgactctggctttcccccaggtatacatgttcctggtgaaatggcaggacctgtcggagaaggtggtctatcggcg

SEQ ID NO: 18597 - RNA, 84 nt, synthetic construct
  source 1..84: mol_type = other RNA
gggtcccccgactctggctttcccccaggtttacatgttcctggtgaaatggcaggacctgtcggagaaggtggtctataggcg

SEQ ID NO: 18598 - RNA, 84 nt, synthetic construct
  source 1..84: mol_type = other RNA
gggtcccccgactctggctttcccccaggtctacatgttcctggtgaaatggcaggacctgtcggagaaggtggtctacaggcg

SEQ ID NO: 18599 - RNA, 84 nt, synthetic construct
  source 1..84: mol_type = other RNA
gggtcccccgactctggctttcccccaggtctacatgttcctggtgaaatggcaggacctgtcggagaaggtggtctaccggcg

SEQ ID NO: 18600 - RNA, 84 nt, synthetic construct
  source 1..84: mol_type = other RNA
gggtcccccgactctggctttcccccaggtctacatgttcctggtgaaatggcaggacctgtcggagaaggtggtctataggcg

SEQ ID NO: 18601 - RNA, 84 nt, synthetic construct
  source 1..84: mol_type = other RNA
gggtcccccgactctggctttcccccaggtttacatgttcctggtgaaatggcaggacctgtcggagaaggtggtctatagacg

SEQ ID NO: 18602 - RNA, 84 nt, synthetic construct
  source 1..84: mol_type = other RNA
gggtcccccgactctggctttcccccaggtttacatgttcctggtgaaatggcaggacctgtcggagaaggtggtctaccggcg

SEQ ID NO: 18603 - RNA, 84 nt, synthetic construct
  source 1..84: mol_type = other RNA
gggtcccccgactctggctttcccccaggtttacatgttcctggtgaaatggcaggacctgtcggagaaggtggtctacagacg

SEQ ID NO: 18604 - RNA, 84 nt, synthetic construct
  source 1..84: mol_type = other RNA
gggtcccccgactctggctttcccccaggtatacatgttcctggtgaaatggcaggacctgtcggagaaggtggtctataggcg

SEQ ID NO: 18605 - RNA, 84 nt, synthetic construct
  source 1..84: mol_type = other RNA
gggtcccccgactctggctttcccccaggtctacatgttcctggtgaaatggcaggacctgtcggagaaggtggtctatagacg

SEQ ID NO: 18606 - RNA, 84 nt, synthetic construct
  source 1..84: mol_type = other RNA
gggtcccccgactctggctttcccccaggtatacatgttcctggtgaaatggcaggacctgtcggagaaggtggtctacagacg

SEQ ID NO: 18607 - RNA, 84 nt, synthetic construct
  source 1..84: mol_type = other RNA
gggtcccccgactctggctttcccccaggtatacatgttcctggtgaaatggcaggacctgtcggagaaggtggtctacaggcg

SEQ ID NO: 18608 - RNA, 84 nt, synthetic construct
  source 1..84: mol_type = other RNA
gggtcccccgactctggctttcccccaggtatacatgttcctggtgaaatggcaggacctgtcggagaaggtggtctaccggcg

SEQ ID NO: 18609 - RNA, 84 nt, synthetic construct
  source 1..84: mol_type = other RNA
gggtcccccgactctggctttcccccaggtctacatgttcctggtgaaatggcaggacctgtcggagaaggtggtctacagacg

SEQ ID NO: 18610 - RNA, 84 nt, synthetic construct
  source 1..84: mol_type = other RNA
gggtcccccgactctggctttcccccaggtgtacatgttcctggtgaaatggcaggacctgtcggagaaggtggtctacagacg

SEQ ID NO: 18611 - RNA, 84 nt, synthetic construct
  source 1..84: mol_type = other RNA
gggtcccccgactctggctttcccccaggtgtacatgttcctggtgaaatggcaggacctgtcggagaaggtggtctatagacg

SEQ ID NO: 18612 - RNA, 84 nt, synthetic construct
  source 1..84: mol_type = other RNA
gggtcccccgactctggctttcccccaggtgtacatgttcctggtgaaatggcaggacctgtcggagaaggtggtctaccggcg

SEQ ID NO: 18613 - RNA, 84 nt, synthetic construct
  source 1..84: mol_type = other RNA
gggtcccccgactctggctttcccccaggtgtacatgttcctggtgaaatggcaggacctgtcggagaaggtggtctacaggcg

SEQ ID NO: 18614 - RNA, 84 nt, synthetic construct
  source 1..84: mol_type = other RNA
gggtcccccgactctggctttcccccaggtgtacatgttcctggtgaaatggcaggacctgtcggagaaggtggtctataggcg

SEQ ID NO: 18615 - RNA, 84 nt, synthetic construct
  source 1..84: mol_type = other RNA
gggtcccccgactctggctttcccccaggtgtacatgttcctggtgaaatggcaggacctgtcggagaaggtggtctatcggcg

SEQ ID NO: 18616 - RNA, 84 nt, synthetic construct
  source 1..84: mol_type = other RNA
gggtcccccgactctggctttcccccaggtctacatgttcctggtgaaatggcaggacctgtcggagaaggtggtctatcggcg

SEQ ID NO: 18617 - RNA, 85 nt, synthetic construct
  source 1..85: mol_type = other RNA
ggggtcccccgactctggctttcccccaggtgtacatgttcctggtgaaatggcaggacctgtcggagaaggtggtctacaggcg

SEQ ID NO: 18618 - RNA, 85 nt, synthetic construct
  source 1..85: mol_type = other RNA
ggggtcccccgactctggctttcccccaggtctacatgttcctggtgaaatggcaggacctgtcggagaaggtggtctataggcg

SEQ ID NO: 18619 - RNA, 85 nt, synthetic construct
  source 1..85: mol_type = other RNA
ggggtcccccgactctggctttcccccaggtatacatgttcctggtgaaatggcaggacctgtcggagaaggtggtctatcggcg

SEQ ID NO: 18620 - RNA, 85 nt, synthetic construct
  source 1..85: mol_type = other RNA
ggggtcccccgactctggctttcccccaggtctacatgttcctggtgaaatggcaggacctgtcggagaaggtggtctatcggcg

SEQ ID NO: 18621 - RNA, 85 nt, synthetic construct
  source 1..85: mol_type = other RNA
ggggtcccccgactctggctttcccccaggtgtacatgttcctggtgaaatggcaggacctgtcggagaaggtggtctacagacg

SEQ ID NO: 18622 - RNA, 85 nt, synthetic construct
  source 1..85: mol_type = other RNA
ggggtcccccgactctggctttcccccaggtatacatgttcctggtgaaatggcaggacctgtcggagaaggtggtctacagacg

SEQ ID NO: 18623 - RNA, 85 nt, synthetic construct
  source 1..85: mol_type = other RNA
ggggtcccccgactctggctttcccccaggtatacatgttcctggtgaaatggcaggacctgtcggagaaggtggtctaccggcg

SEQ ID NO: 18624 - RNA, 85 nt, synthetic construct
  source 1..85: mol_type = other RNA
ggggtcccccgactctggctttcccccaggtatacatgttcctggtgaaatggcaggacctgtcggagaaggtggtctatagacg

SEQ ID NO: 18625 - RNA, 85 nt, synthetic construct
  source 1..85: mol_type = other RNA
ggggtcccccgactctggctttcccccaggtatacatgttcctggtgaaatggcaggacctgtcggagaaggtggtctataggcg

SEQ ID NO: 18626 - RNA, 85 nt, synthetic construct
  source 1..85: mol_type = other RNA
ggggtcccccgactctggctttcccccaggtatacatgttcctggtgaaatggcaggacctgtcggagaaggtggtctacaggcg

SEQ ID NO: 18627 - RNA, 85 nt, synthetic construct
  source 1..85: mol_type = other RNA
ggggtcccccgactctggctttcccccaggtctacatgttcctggtgaaatggcaggacctgtcggagaaggtggtctacagacg

SEQ ID NO: 18628 - RNA, 85 nt, synthetic construct
  source 1..85: mol_type = other RNA
ggggtcccccgactctggctttcccccaggtctacatgttcctggtgaaatggcaggacctgtcggagaaggtggtctacaggcg

SEQ ID NO: 18629 - RNA, 85 nt, synthetic construct
  source 1..85: mol_type = other RNA
ggggtcccccgactctggctttcccccaggtttacatgttcctggtgaaatggcaggacctgtcggagaaggtggtctataggcg

SEQ ID NO: 18630 - RNA, 85 nt, synthetic construct
  source 1..85: mol_type = other RNA
ggggtcccccgactctggctttcccccaggtctacatgttcctggtgaaatggcaggacctgtcggagaaggtggtctatagacg

SEQ ID NO: 18631 - RNA, 85 nt, synthetic construct
  source 1..85: mol_type = other RNA
ggggtcccccgactctggctttcccccaggtgtacatgttcctggtgaaatggcaggacctgtcggagaaggtggtctaccggcg

SEQ ID NO: 18632 - RNA, 85 nt, synthetic construct
  source 1..85: mol_type = other RNA
ggggtcccccgactctggctttcccccaggtgtacatgttcctggtgaaatggcaggacctgtcggagaaggtggtctatagacg

SEQ ID NO: 18633 - RNA, 85 nt, synthetic construct
  source 1..85: mol_type = other RNA
ggggtcccccgactctggctttcccccaggtgtacatgttcctggtgaaatggcaggacctgtcggagaaggtggtctataggcg

SEQ ID NO: 18634 - RNA, 85 nt, synthetic construct
  source 1..85: mol_type = other RNA
ggggtcccccgactctggctttcccccaggtgtacatgttcctggtgaaatggcaggacctgtcggagaaggtggtctatcggcg

SEQ ID NO: 18635 - RNA, 85 nt, synthetic construct
  source 1..85: mol_type = other RNA
ggggtcccccgactctggctttcccccaggtctacatgttcctggtgaaatggcaggacctgtcggagaaggtggtctaccggcg

SEQ ID NO: 18636 - RNA, 85 nt, synthetic construct
  source 1..85: mol_type = other RNA
ggggtcccccgactctggctttcccccaggtttacatgttcctggtgaaatggcaggacctgtcggagaaggtggtctatcggcg

SEQ ID NO: 18637 - RNA, 85 nt, synthetic construct
  source 1..85: mol_type = other RNA
ggggtcccccgactctggctttcccccaggtttacatgttcctggtgaaatggcaggacctgtcggagaaggtggtctatagacg

SEQ ID NO: 18638 - RNA, 85 nt, synthetic construct
  source 1..85: mol_type = other RNA
ggggtcccccgactctggctttcccccaggtttacatgttcctggtgaaatggcaggacctgtcggagaaggtggtctaccggcg

SEQ ID NO: 18639 - RNA, 85 nt, synthetic construct
  source 1..85: mol_type = other RNA
ggggtcccccgactctggctttcccccaggtttacatgttcctggtgaaatggcaggacctgtcggagaaggtggtctacaggcg

SEQ ID NO: 18640 - RNA, 85 nt, synthetic construct
  source 1..85: mol_type = other RNA
ggggtcccccgactctggctttcccccaggtttacatgttcctggtgaaatggcaggacctgtcggagaaggtggtctacagacg

SEQ ID NO: 18641 - RNA, 86 nt, synthetic construct
  source 1..86: mol_type = other RNA
tggggtcccccgactctggctttcccccaggtatacatgttcctggtgaaatggcaggacctgtcggagaaggtggtctacagacg

SEQ ID NO: 18642 - RNA, 86 nt, synthetic construct
  source 1..86: mol_type = other RNA
tggggtcccccgactctggctttcccccaggtctacatgttcctggtgaaatggcaggacctgtcggagaaggtggtctaccggcg

SEQ ID NO: 18643 - RNA, 86 nt, synthetic construct
  source 1..86: mol_type = other RNA
tggggtcccccgactctggctttcccccaggtctacatgttcctggtgaaatggcaggacctgtcggagaaggtggtctatcggcg

SEQ ID NO: 18644 - RNA, 86 nt, synthetic construct
  source 1..86: mol_type = other RNA
tggggtcccccgactctggctttcccccaggtgtacatgttcctggtgaaatggcaggacctgtcggagaaggtggtctacaggcg

SEQ ID NO: 18645 - RNA, 86 nt, synthetic construct
  source 1..86: mol_type = other RNA
tggggtcccccgactctggctttcccccaggtatacatgttcctggtgaaatggcaggacctgtcggagaaggtggtctaccggcg

SEQ ID NO: 18646 - RNA, 86 nt, synthetic construct
  source 1..86: mol_type = other RNA
tggggtcccccgactctggctttcccccaggtctacatgttcctggtgaaatggcaggacctgtcggagaaggtggtctacagacg

SEQ ID NO: 18647 - RNA, 86 nt, synthetic construct
  source 1..86: mol_type = other RNA
tggggtcccccgactctggctttcccccaggtatacatgttcctggtgaaatggcaggacctgtcggagaaggtggtctatcggcg

SEQ ID NO: 18648 - RNA, 86 nt, synthetic construct
  source 1..86: mol_type = other RNA
tggggtcccccgactctggctttcccccaggtatacatgttcctggtgaaatggcaggacctgtcggagaaggtggtctataggcg

SEQ ID NO: 18649 - RNA, 86 nt, synthetic construct
  source 1..86: mol_type = other RNA
tggggtcccccgactctggctttcccccaggtatacatgttcctggtgaaatggcaggacctgtcggagaaggtggtctatagacg

SEQ ID NO: 18650 - RNA, 86 nt, synthetic construct
  source 1..86: mol_type = other RNA
tggggtcccccgactctggctttcccccaggtctacatgttcctggtgaaatggcaggacctgtcggagaaggtggtctatagacg

SEQ ID NO: 18651 - RNA, 86 nt, synthetic construct
  source 1..86: mol_type = other RNA
tggggtcccccgactctggctttcccccaggtctacatgttcctggtgaaatggcaggacctgtcggagaaggtggtctataggcg

SEQ ID NO: 18652 - RNA, 86 nt, synthetic construct
  source 1..86: mol_type = other RNA
tggggtcccccgactctggctttcccccaggtgtacatgttcctggtgaaatggcaggacctgtcggagaaggtggtctaccggcg

SEQ ID NO: 18653 - RNA, 86 nt, synthetic construct
  source 1..86: mol_type = other RNA
tggggtcccccgactctggctttcccccaggtctacatgttcctggtgaaatggcaggacctgtcggagaaggtggtctacaggcg

SEQ ID NO: 18654 - RNA, 86 nt, synthetic construct
  source 1..86: mol_type = other RNA
tggggtcccccgactctggctttcccccaggtttacatgttcctggtgaaatggcaggacctgtcggagaaggtggtctatcggcg

SEQ ID NO: 18655 - RNA, 86 nt, synthetic construct
  source 1..86: mol_type = other RNA
tggggtcccccgactctggctttcccccaggtttacatgttcctggtgaaatggcaggacctgtcggagaaggtggtctataggcg

SEQ ID NO: 18656 - RNA, 86 nt, synthetic construct
  source 1..86: mol_type = other RNA
tggggtcccccgactctggctttcccccaggtttacatgttcctggtgaaatggcaggacctgtcggagaaggtggtctatagacg

SEQ ID NO: 18657 - RNA, 86 nt, synthetic construct
  source 1..86: mol_type = other RNA
tggggtcccccgactctggctttcccccaggtttacatgttcctggtgaaatggcaggacctgtcggagaaggtggtctaccggcg

SEQ ID NO: 18658 - RNA, 86 nt, synthetic construct
  source 1..86: mol_type = other RNA
tggggtcccccgactctggctttcccccaggtttacatgttcctggtgaaatggcaggacctgtcggagaaggtggtctacaggcg

SEQ ID NO: 18659 - RNA, 86 nt, synthetic construct
  source 1..86: mol_type = other RNA
tggggtcccccgactctggctttcccccaggtgtacatgttcctggtgaaatggcaggacctgtcggagaaggtggtctatcggcg

SEQ ID NO: 18660 - RNA, 86 nt, synthetic construct
  source 1..86: mol_type = other RNA
tggggtcccccgactctggctttcccccaggtgtacatgttcctggtgaaatggcaggacctgtcggagaaggtggtctataggcg

SEQ ID NO: 18661 - RNA, 86 nt, synthetic construct
  source 1..86: mol_type = other RNA
tggggtcccccgactctggctttcccccaggtgtacatgttcctggtgaaatggcaggacctgtcggagaaggtggtctacagacg

SEQ ID NO: 18662 - RNA, 86 nt, synthetic construct
  source 1..86: mol_type = other RNA
tggggtcccccgactctggctttcccccaggtttacatgttcctggtgaaatggcaggacctgtcggagaaggtggtctacagacg

SEQ ID NO: 18663 - RNA, 86 nt, synthetic construct
  source 1..86: mol_type = other RNA
tggggtcccccgactctggctttcccccaggtgtacatgttcctggtgaaatggcaggacctgtcggagaaggtggtctatagacg

SEQ ID NO: 18664 - RNA, 86 nt, synthetic construct
  source 1..86: mol_type = other RNA
tggggtcccccgactctggctttcccccaggtatacatgttcctggtgaaatggcaggacctgtcggagaaggtggtctacaggcg

SEQ ID NO: 18665 - RNA, 87 nt, synthetic construct
  source 1..87: mol_type = other RNA
atggggtcccccgactctggctttcccccaggtatacatgttcctggtgaaatggcaggacctgtcggagaaggtggtctacaggcg

SEQ ID NO: 18666 - RNA, 87 nt, synthetic construct
  source 1..87: mol_type = other RNA
atggggtcccccgactctggctttcccccaggtatacatgttcctggtgaaatggcaggacctgtcggagaaggtggtctacagacg

SEQ ID NO: 18667 - RNA, 87 nt, synthetic construct
  source 1..87: mol_type = other RNA
atggggtcccccgactctggctttcccccaggtctacatgttcctggtgaaatggcaggacctgtcggagaaggtggtctatagacg

SEQ ID NO: 18668 - RNA, 87 nt, synthetic construct
  source 1..87: mol_type = other RNA
atggggtcccccgactctggctttcccccaggtatacatgttcctggtgaaatggcaggacctgtcggagaaggtggtctaccggcg

SEQ ID NO: 18669 - RNA, 87 nt, synthetic construct
  source 1..87: mol_type = other RNA
atggggtcccccgactctggctttcccccaggtatacatgttcctggtgaaatggcaggacctgtcggagaaggtggtctatagacg

SEQ ID NO: 18670 - RNA, 87 nt, synthetic construct
  source 1..87: mol_type = other RNA
atggggtcccccgactctggctttcccccaggtatacatgttcctggtgaaatggcaggacctgtcggagaaggtggtctataggcg

SEQ ID NO: 18671 - RNA, 87 nt, synthetic construct
  source 1..87: mol_type = other RNA
atggggtcccccgactctggctttcccccaggtgtacatgttcctggtgaaatggcaggacctgtcggagaaggtggtctatcggcg

SEQ ID NO: 18672 - RNA, 87 nt, synthetic construct
  source 1..87: mol_type = other RNA
atggggtcccccgactctggctttcccccaggtctacatgttcctggtgaaatggcaggacctgtcggagaaggtggtctacagacg

SEQ ID NO: 18673 - RNA, 87 nt, synthetic construct
  source 1..87: mol_type = other RNA
atggggtcccccgactctggctttcccccaggtttacatgttcctggtgaaatggcaggacctgtcggagaaggtggtctatcggcg

SEQ ID NO: 18674 - RNA, 87 nt, synthetic construct
  source 1..87: mol_type = other RNA
atggggtcccccgactctggctttcccccaggtttacatgttcctggtgaaatggcaggacctgtcggagaaggtggtctataggcg

SEQ ID NO: 18675 - RNA, 87 nt, synthetic construct
  source 1..87: mol_type = other RNA
atggggtcccccgactctggctttcccccaggtttacatgttcctggtgaaatggcaggacctgtcggagaaggtggtctatagacg

SEQ ID NO: 18676 - RNA, 87 nt, synthetic construct
  source 1..87: mol_type = other RNA
atggggtcccccgactctggctttcccccaggtttacatgttcctggtgaaatggcaggacctgtcggagaaggtggtctaccggcg

SEQ ID NO: 18677 - RNA, 87 nt, synthetic construct
  source 1..87: mol_type = other RNA
atggggtcccccgactctggctttcccccaggtttacatgttcctggtgaaatggcaggacctgtcggagaaggtggtctacaggcg

SEQ ID NO: 18678 - RNA, 87 nt, synthetic construct
  source 1..87: mol_type = other RNA
atggggtcccccgactctggctttcccccaggtttacatgttcctggtgaaatggcaggacctgtcggagaaggtggtctacagacg

SEQ ID NO: 18679 - RNA, 87 nt, synthetic construct
  source 1..87: mol_type = other RNA
atggggtcccccgactctggctttcccccaggtgtacatgttcctggtgaaatggcaggacctgtcggagaaggtggtctataggcg

SEQ ID NO: 18680 - RNA, 87 nt, synthetic construct
  source 1..87: mol_type = other RNA
atggggtcccccgactctggctttcccccaggtgtacatgttcctggtgaaatggcaggacctgtcggagaaggtggtctacaggcg

SEQ ID NO: 18681 - RNA, 87 nt, synthetic construct
  source 1..87: mol_type = other RNA
atggggtcccccgactctggctttcccccaggtgtacatgttcctggtgaaatggcaggacctgtcggagaaggtggtctacagacg

SEQ ID NO: 18682 - RNA, 87 nt, synthetic construct
  source 1..87: mol_type = other RNA
atggggtcccccgactctggctttcccccaggtgtacatgttcctggtgaaatggcaggacctgtcggagaaggtggtctaccggcg

SEQ ID NO: 18683 - RNA, 87 nt, synthetic construct
  source 1..87: mol_type = other RNA
atggggtcccccgactctggctttcccccaggtctacatgttcctggtgaaatggcaggacctgtcggagaaggtggtctataggcg

SEQ ID NO: 18684 - RNA, 87 nt, synthetic construct
  source 1..87: mol_type = other RNA
atggggtcccccgactctggctttcccccaggtgtacatgttcctggtgaaatggcaggacctgtcggagaaggtggtctatagacg

SEQ ID NO: 18685 - RNA, 87 nt, synthetic construct
  source 1..87: mol_type = other RNA
atggggtcccccgactctggctttcccccaggtctacatgttcctggtgaaatggcaggacctgtcggagaaggtggtctaccggcg

SEQ ID NO: 18686 - RNA, 87 nt, synthetic construct
  source 1..87: mol_type = other RNA
atggggtcccccgactctggctttcccccaggtctacatgttcctggtgaaatggcaggacctgtcggagaaggtggtctacaggcg

SEQ ID NO: 18687 - RNA, 87 nt, synthetic construct
  source 1..87: mol_type = other RNA
atggggtcccccgactctggctttcccccaggtatacatgttcctggtgaaatggcaggacctgtcggagaaggtggtctatcggcg

SEQ ID NO: 18688 - RNA, 87 nt, synthetic construct
  source 1..87: mol_type = other RNA
atggggtcccccgactctggctttcccccaggtctacatgttcctggtgaaatggcaggacctgtcggagaaggtggtctatcggcg

SEQ ID NO: 18689 - RNA, 88 nt, synthetic construct
  source 1..88: mol_type = other RNA
aatggggtcccccgactctggctttcccccaggtgtacatgttcctggtgaaatggcaggacctgtcggagaaggtggtctacagacg

SEQ ID NO: 18690 - RNA, 88 nt, synthetic construct
  source 1..88: mol_type = other RNA
aatggggtcccccgactctggctttcccccaggtgtacatgttcctggtgaaatggcaggacctgtcggagaaggtggtctatcggcg

SEQ ID NO: 18691 - RNA, 88 nt, synthetic construct
  source 1..88: mol_type = other RNA
aatggggtcccccgactctggctttcccccaggtctacatgttcctggtgaaatggcaggacctgtcggagaaggtggtctatagacg

SEQ ID NO: 18692 - RNA, 88 nt, synthetic construct
  source 1..88: mol_type = other RNA
aatggggtcccccgactctggctttcccccaggtgtacatgttcctggtgaaatggcaggacctgtcggagaaggtggtctaccggcg

SEQ ID NO: 18693 - RNA, 88 nt, synthetic construct
  source 1..88: mol_type = other RNA
aatggggtcccccgactctggctttcccccaggtgtacatgttcctggtgaaatggcaggacctgtcggagaaggtggtctatagacg

SEQ ID NO: 18694 - RNA, 88 nt, synthetic construct
  source 1..88: mol_type = other RNA
aatggggtcccccgactctggctttcccccaggtgtacatgttcctggtgaaatggcaggacctgtcggagaaggtggtctataggcg

SEQ ID NO: 18695 - RNA, 88 nt, synthetic construct
  source 1..88: mol_type = other RNA
aatggggtcccccgactctggctttcccccaggtttacatgttcctggtgaaatggcaggacctgtcggagaaggtggtctatcggcg

SEQ ID NO: 18696 - RNA, 88 nt, synthetic construct
  source 1..88: mol_type = other RNA
aatggggtcccccgactctggctttcccccaggtttacatgttcctggtgaaatggcaggacctgtcggagaaggtggtctacaggcg

SEQ ID NO: 18697 - RNA, 88 nt, synthetic construct
  source 1..88: mol_type = other RNA
aatggggtcccccgactctggctttcccccaggtttacatgttcctggtgaaatggcaggacctgtcggagaaggtggtctaccggcg

SEQ ID NO: 18698 - RNA, 88 nt, synthetic construct
  source 1..88: mol_type = other RNA
aatggggtcccccgactctggctttcccccaggtttacatgttcctggtgaaatggcaggacctgtcggagaaggtggtctataggcg

SEQ ID NO: 18699 - RNA, 88 nt, synthetic construct
  source 1..88: mol_type = other RNA
aatggggtcccccgactctggctttcccccaggtttacatgttcctggtgaaatggcaggacctgtcggagaaggtggtctacagacg

SEQ ID NO: 18700 - RNA, 88 nt, synthetic construct
  source 1..88: mol_type = other RNA
aatggggtcccccgactctggctttcccccaggtctacatgttcctggtgaaatggcaggacctgtcggagaaggtggtctaccggcg

SEQ ID NO: 18701 - RNA, 88 nt, synthetic construct
  source 1..88: mol_type = other RNA
aatggggtcccccgactctggctttcccccaggtctacatgttcctggtgaaatggcaggacctgtcggagaaggtggtctatcggcg

SEQ ID NO: 18702 - RNA, 88 nt, synthetic construct
  source 1..88: mol_type = other RNA
aatggggtcccccgactctggctttcccccaggtatacatgttcctggtgaaatggcaggacctgtcggagaaggtggtctatcggcg

SEQ ID NO: 18703 - RNA, 88 nt, synthetic construct
  source 1..88: mol_type = other RNA
aatggggtcccccgactctggctttcccccaggtctacatgttcctggtgaaatggcaggacctgtcggagaaggtggtctacagacg

SEQ ID NO: 18704 - RNA, 88 nt, synthetic construct
  source 1..88: mol_type = other RNA
aatggggtcccccgactctggctttcccccaggtctacatgttcctggtgaaatggcaggacctgtcggagaaggtggtctacaggcg

SEQ ID NO: 18705 - RNA, 88 nt, synthetic construct
  source 1..88: mol_type = other RNA
aatggggtcccccgactctggctttcccccaggtatacatgttcctggtgaaatggcaggacctgtcggagaaggtggtctataggcg

SEQ ID NO: 18706 - RNA, 88 nt, synthetic construct
  source 1..88: mol_type = other RNA
aatggggtcccccgactctggctttcccccaggtttacatgttcctggtgaaatggcaggacctgtcggagaaggtggtctatagacg

SEQ ID NO: 18707 - RNA, 88 nt, synthetic construct
  source 1..88: mol_type = other RNA
aatggggtcccccgactctggctttcccccaggtctacatgttcctggtgaaatggcaggacctgtcggagaaggtggtctataggcg

SEQ ID NO: 18708 - RNA, 88 nt, synthetic construct
  source 1..88: mol_type = other RNA
aatggggtcccccgactctggctttcccccaggtgtacatgttcctggtgaaatggcaggacctgtcggagaaggtggtctacaggcg

SEQ ID NO: 18709 - RNA, 88 nt, synthetic construct
  source 1..88: mol_type = other RNA
aatggggtcccccgactctggctttcccccaggtatacatgttcctggtgaaatggcaggacctgtcggagaaggtggtctacaggcg

SEQ ID NO: 18710 - RNA, 88 nt, synthetic construct
  source 1..88: mol_type = other RNA
aatggggtcccccgactctggctttcccccaggtatacatgttcctggtgaaatggcaggacctgtcggagaaggtggtctacagacg

SEQ ID NO: 18711 - RNA, 88 nt, synthetic construct
  source 1..88: mol_type = other RNA
aatggggtcccccgactctggctttcccccaggtatacatgttcctggtgaaatggcaggacctgtcggagaaggtggtctatagacg

SEQ ID NO: 18712 - RNA, 88 nt, synthetic construct
  source 1..88: mol_type = other RNA
aatggggtcccccgactctggctttcccccaggtatacatgttcctggtgaaatggcaggacctgtcggagaaggtggtctaccggcg

SEQ ID NO: 18713 - RNA, 89 nt, synthetic construct
  source 1..89: mol_type = other RNA
gaatggggtcccccgactctggctttcccccaggtgtacatgttcctggtgaaatggcaggacctgtcggagaaggtggtctaccggcg

SEQ ID NO: 18714 - RNA, 89 nt, synthetic construct
  source 1..89: mol_type = other RNA
gaatggggtcccccgactctggctttcccccaggtgtacatgttcctggtgaaatggcaggacctgtcggagaaggtggtctacagacg

SEQ ID NO: 18715 - RNA, 89 nt, synthetic construct
  source 1..89: mol_type = other RNA
gaatggggtcccccgactctggctttcccccaggtatacatgttcctggtgaaatggcaggacctgtcggagaaggtggtctacagacg

SEQ ID NO: 18716 - RNA, 89 nt, synthetic construct
  source 1..89: mol_type = other RNA
gaatggggtcccccgactctggctttcccccaggtgtacatgttcctggtgaaatggcaggacctgtcggagaaggtggtctatagacg

SEQ ID NO: 18717 - RNA, 89 nt, synthetic construct
  source 1..89: mol_type = other RNA
gaatggggtcccccgactctggctttcccccaggtgtacatgttcctggtgaaatggcaggacctgtcggagaaggtggtctataggcg

SEQ ID NO: 18718 - RNA, 89 nt, synthetic construct
  source 1..89: mol_type = other RNA
gaatggggtcccccgactctggctttcccccaggtgtacatgttcctggtgaaatggcaggacctgtcggagaaggtggtctatcggcg

SEQ ID NO: 18719 - RNA, 89 nt, synthetic construct
  source 1..89: mol_type = other RNA
gaatggggtcccccgactctggctttcccccaggtttacatgttcctggtgaaatggcaggacctgtcggagaaggtggtctacagacg

SEQ ID NO: 18720 - RNA, 89 nt, synthetic construct
  source 1..89: mol_type = other RNA
gaatggggtcccccgactctggctttcccccaggtgtacatgttcctggtgaaatggcaggacctgtcggagaaggtggtctacaggcg

SEQ ID NO: 18721 - RNA, 89 nt, synthetic construct
  source 1..89: mol_type = other RNA
gaatggggtcccccgactctggctttcccccaggtttacatgttcctggtgaaatggcaggacctgtcggagaaggtggtctaccggcg

SEQ ID NO: 18722 - RNA, 89 nt, synthetic construct
  source 1..89: mol_type = other RNA
gaatggggtcccccgactctggctttcccccaggtttacatgttcctggtgaaatggcaggacctgtcggagaaggtggtctatagacg

SEQ ID NO: 18723 - RNA, 89 nt, synthetic construct
  source 1..89: mol_type = other RNA
gaatggggtcccccgactctggctttcccccaggtttacatgttcctggtgaaatggcaggacctgtcggagaaggtggtctataggcg

SEQ ID NO: 18724 - RNA, 89 nt, synthetic construct
  source 1..89: mol_type = other RNA
gaatggggtcccccgactctggctttcccccaggtttacatgttcctggtgaaatggcaggacctgtcggagaaggtggtctatcggcg

SEQ ID NO: 18725 - RNA, 89 nt, synthetic construct
  source 1..89: mol_type = other RNA
gaatggggtcccccgactctggctttcccccaggtttacatgttcctggtgaaatggcaggacctgtcggagaaggtggtctacaggcg

SEQ ID NO: 18726 - RNA, 89 nt, synthetic construct
  source 1..89: mol_type = other RNA
gaatggggtcccccgactctggctttcccccaggtctacatgttcctggtgaaatggcaggacctgtcggagaaggtggtctatcggcg

SEQ ID NO: 18727 - RNA, 89 nt, synthetic construct
  source 1..89: mol_type = other RNA
gaatggggtcccccgactctggctttcccccaggtatacatgttcctggtgaaatggcaggacctgtcggagaaggtggtctacaggcg

SEQ ID NO: 18728 - RNA, 89 nt, synthetic construct
  source 1..89: mol_type = other RNA
gaatggggtcccccgactctggctttcccccaggtctacatgttcctggtgaaatggcaggacctgtcggagaaggtggtctataggcg

SEQ ID NO: 18729 - RNA, 89 nt, synthetic construct
  source 1..89: mol_type = other RNA
gaatggggtcccccgactctggctttcccccaggtctacatgttcctggtgaaatggcaggacctgtcggagaaggtggtctatagacg

SEQ ID NO: 18730 - RNA, 89 nt, synthetic construct
  source 1..89: mol_type = other RNA
gaatggggtcccccgactctggctttcccccaggtctacatgttcctggtgaaatggcaggacctgtcggagaaggtggtctaccggcg

SEQ ID NO: 18731 - RNA, 89 nt, synthetic construct
  source 1..89: mol_type = other RNA
gaatggggtcccccgactctggctttcccccaggtctacatgttcctggtgaaatggcaggacctgtcggagaaggtggtctacagacg

SEQ ID NO: 18732 - RNA, 89 nt, synthetic construct
  source 1..89: mol_type = other RNA
gaatggggtcccccgactctggctttcccccaggtatacatgttcctggtgaaatggcaggacctgtcggagaaggtggtctatcggcg

SEQ ID NO: 18733 - RNA, 89 nt, synthetic construct
  source 1..89: mol_type = other RNA
gaatggggtcccccgactctggctttcccccaggtatacatgttcctggtgaaatggcaggacctgtcggagaaggtggtctataggcg

SEQ ID NO: 18734 - RNA, 89 nt, synthetic construct
  source 1..89: mol_type = other RNA
gaatggggtcccccgactctggctttcccccaggtatacatgttcctggtgaaatggcaggacctgtcggagaaggtggtctatagacg

SEQ ID NO: 18735 - RNA, 89 nt, synthetic construct
  source 1..89: mol_type = other RNA
gaatggggtcccccgactctggctttcccccaggtatacatgttcctggtgaaatggcaggacctgtcggagaaggtggtctaccggcg

SEQ ID NO: 18736 - RNA, 89 nt, synthetic construct
  source 1..89: mol_type = other RNA
gaatggggtcccccgactctggctttcccccaggtctacatgttcctggtgaaatggcaggacctgtcggagaaggtggtctacaggcg

SEQ ID NO: 18737 - RNA, 90 nt, synthetic construct
  source 1..90: mol_type = other RNA
tgaatggggtcccccgactctggctttcccccaggtatacatgttcctggtgaaatggcaggacctgtcggagaaggtggtctacaggcg

SEQ ID NO: 18738 - RNA, 90 nt, synthetic construct
  source 1..90: mol_type = other RNA
tgaatggggtcccccgactctggctttcccccaggtatacatgttcctggtgaaatggcaggacctgtcggagaaggtggtctaccggcg

SEQ ID NO: 18739 - RNA, 90 nt, synthetic construct
  source 1..90: mol_type = other RNA
tgaatggggtcccccgactctggctttcccccaggtatacatgttcctggtgaaatggcaggacctgtcggagaaggtggtctatagacg

SEQ ID NO: 18740 - RNA, 90 nt, synthetic construct
  source 1..90: mol_type = other RNA
tgaatggggtcccccgactctggctttcccccaggtatacatgttcctggtgaaatggcaggacctgtcggagaaggtggtctataggcg

SEQ ID NO: 18741 - RNA, 90 nt, synthetic construct
  source 1..90: mol_type = other RNA
tgaatggggtcccccgactctggctttcccccaggtctacatgttcctggtgaaatggcaggacctgtcggagaaggtggtctatcggcg

SEQ ID NO: 18742 - RNA, 90 nt, synthetic construct
  source 1..90: mol_type = other RNA
tgaatggggtcccccgactctggctttcccccaggtctacatgttcctggtgaaatggcaggacctgtcggagaaggtggtctacaggcg

SEQ ID NO: 18743 - RNA, 90 nt, synthetic construct
  source 1..90: mol_type = other RNA
tgaatggggtcccccgactctggctttcccccaggtctacatgttcctggtgaaatggcaggacctgtcggagaaggtggtctaccggcg

SEQ ID NO: 18744 - RNA, 90 nt, synthetic construct
  source 1..90: mol_type = other RNA
tgaatggggtcccccgactctggctttcccccaggtctacatgttcctggtgaaatggcaggacctgtcggagaaggtggtctatagacg

SEQ ID NO: 18745 - RNA, 90 nt, synthetic construct
  source 1..90: mol_type = other RNA
tgaatggggtcccccgactctggctttcccccaggtgtacatgttcctggtgaaatggcaggacctgtcggagaaggtggtctatcggcg

SEQ ID NO: 18746 - RNA, 90 nt, synthetic construct
  source 1..90: mol_type = other RNA
tgaatggggtcccccgactctggctttcccccaggtctacatgttcctggtgaaatggcaggacctgtcggagaaggtggtctataggcg

SEQ ID NO: 18747 - RNA, 90 nt, synthetic construct
  source 1..90: mol_type = other RNA
tgaatggggtcccccgactctggctttcccccaggtatacatgttcctggtgaaatggcaggacctgtcggagaaggtggtctacagacg

SEQ ID NO: 18748 - RNA, 90 nt, synthetic construct
  source 1..90: mol_type = other RNA
tgaatggggtcccccgactctggctttcccccaggtttacatgttcctggtgaaatggcaggacctgtcggagaaggtggtctacaggcg

SEQ ID NO: 18749 - RNA, 90 nt, synthetic construct
  source 1..90: mol_type = other RNA
tgaatggggtcccccgactctggctttcccccaggtatacatgttcctggtgaaatggcaggacctgtcggagaaggtggtctatcggcg

SEQ ID NO: 18750 - RNA, 90 nt, synthetic construct
  source 1..90: mol_type = other RNA
tgaatggggtcccccgactctggctttcccccaggtgtacatgttcctggtgaaatggcaggacctgtcggagaaggtggtctaccggcg

SEQ ID NO: 18751 - RNA, 90 nt, synthetic construct
  source 1..90: mol_type = other RNA
tgaatggggtcccccgactctggctttcccccaggtgtacatgttcctggtgaaatggcaggacctgtcggagaaggtggtctatagacg

SEQ ID NO: 18752 - RNA, 90 nt, synthetic construct
  source 1..90: mol_type = other RNA
tgaatggggtcccccgactctggctttcccccaggtgtacatgttcctggtgaaatggcaggacctgtcggagaaggtggtctataggcg

SEQ ID NO: 18753 - RNA, 90 nt, synthetic construct
  source 1..90: mol_type = other RNA
tgaatggggtcccccgactctggctttcccccaggtttacatgttcctggtgaaatggcaggacctgtcggagaaggtggtctacagacg

SEQ ID NO: 18754 - RNA, 90 nt, synthetic construct
  source 1..90: mol_type = other RNA
tgaatggggtcccccgactctggctttcccccaggtctacatgttcctggtgaaatggcaggacctgtcggagaaggtggtctacagacg

SEQ ID NO: 18755 - RNA, 90 nt, synthetic construct
  source 1..90: mol_type = other RNA
tgaatggggtcccccgactctggctttcccccaggtttacatgttcctggtgaaatggcaggacctgtcggagaaggtggtctaccggcg

SEQ ID NO: 18756 - RNA, 90 nt, synthetic construct
  source 1..90: mol_type = other RNA
tgaatggggtcccccgactctggctttcccccaggtttacatgttcctggtgaaatggcaggacctgtcggagaaggtggtctatagacg

SEQ ID NO: 18757 - RNA, 90 nt, synthetic construct
  source 1..90: mol_type = other RNA
tgaatggggtcccccgactctggctttcccccaggtttacatgttcctggtgaaatggcaggacctgtcggagaaggtggtctataggcg

SEQ ID NO: 18758 - RNA, 90 nt, synthetic construct
  source 1..90: mol_type = other RNA
tgaatggggtcccccgactctggctttcccccaggtttacatgttcctggtgaaatggcaggacctgtcggagaaggtggtctatcggcg

SEQ ID NO: 18759 - RNA, 90 nt, synthetic construct
  source 1..90: mol_type = other RNA
tgaatggggtcccccgactctggctttcccccaggtgtacatgttcctggtgaaatggcaggacctgtcggagaaggtggtctacaggcg

SEQ ID NO: 18760 - RNA, 90 nt, synthetic construct
  source 1..90: mol_type = other RNA
tgaatggggtcccccgactctggctttcccccaggtgtacatgttcctggtgaaatggcaggacctgtcggagaaggtggtctacagacg

SEQ ID NO: 18761 - RNA, 91 nt, synthetic construct
  source 1..91: mol_type = other RNA
ctgaatggggtcccccgactctggctttcccccaggtatacatgttcctggtgaaatggcaggacctgtcggagaaggtggtctacagacg

SEQ ID NO: 18762 - RNA, 91 nt, synthetic construct
  source 1..91: mol_type = other RNA
ctgaatggggtcccccgactctggctttcccccaggtctacatgttcctggtgaaatggcaggacctgtcggagaaggtggtctataggcg

SEQ ID NO: 18763 - RNA, 91 nt, synthetic construct
  source 1..91: mol_type = other RNA
ctgaatggggtcccccgactctggctttcccccaggtctacatgttcctggtgaaatggcaggacctgtcggagaaggtggtctacagacg

SEQ ID NO: 18764 - RNA, 91 nt, synthetic construct
  source 1..91: mol_type = other RNA
ctgaatggggtcccccgactctggctttcccccaggtttacatgttcctggtgaaatggcaggacctgtcggagaaggtggtctataggcg

SEQ ID NO: 18765 - RNA, 91 nt, synthetic construct
  source 1..91: mol_type = other RNA
ctgaatggggtcccccgactctggctttcccccaggtatacatgttcctggtgaaatggcaggacctgtcggagaaggtggtctacaggcg

SEQ ID NO: 18766 - RNA, 91 nt, synthetic construct
  source 1..91: mol_type = other RNA
ctgaatggggtcccccgactctggctttcccccaggtatacatgttcctggtgaaatggcaggacctgtcggagaaggtggtctaccggcg

SEQ ID NO: 18767 - RNA, 91 nt, synthetic construct
  source 1..91: mol_type = other RNA
ctgaatggggtcccccgactctggctttcccccaggtttacatgttcctggtgaaatggcaggacctgtcggagaaggtggtctacagacg

SEQ ID NO: 18768 - RNA, 91 nt, synthetic construct
  source 1..91: mol_type = other RNA
ctgaatggggtcccccgactctggctttcccccaggtatacatgttcctggtgaaatggcaggacctgtcggagaaggtggtctataggcg

SEQ ID NO: 18769 - RNA, 91 nt, synthetic construct
  source 1..91: mol_type = other RNA
ctgaatggggtcccccgactctggctttcccccaggtatacatgttcctggtgaaatggcaggacctgtcggagaaggtggtctatagacg

SEQ ID NO: 18770 - RNA, 91 nt, synthetic construct
  source 1..91: mol_type = other RNA
ctgaatggggtcccccgactctggctttcccccaggtttacatgttcctggtgaaatggcaggacctgtcggagaaggtggtctatcggcg

SEQ ID NO: 18771 - RNA, 91 nt, synthetic construct
  source 1..91: mol_type = other RNA
ctgaatggggtcccccgactctggctttcccccaggtgtacatgttcctggtgaaatggcaggacctgtcggagaaggtggtctacagacg

SEQ ID NO: 18772 - RNA, 91 nt, synthetic construct
  source 1..91: mol_type = other RNA
ctgaatggggtcccccgactctggctttcccccaggtttacatgttcctggtgaaatggcaggacctgtcggagaaggtggtctatagacg

SEQ ID NO: 18773 - RNA, 91 nt, synthetic construct
  source 1..91: mol_type = other RNA
ctgaatggggtcccccgactctggctttcccccaggtttacatgttcctggtgaaatggcaggacctgtcggagaaggtggtctaccggcg

SEQ ID NO: 18774 - RNA, 91 nt, synthetic construct
  source 1..91: mol_type = other RNA
ctgaatggggtcccccgactctggctttcccccaggtttacatgttcctggtgaaatggcaggacctgtcggagaaggtggtctacaggcg

SEQ ID NO: 18775 - RNA, 91 nt, synthetic construct
  source 1..91: mol_type = other RNA
ctgaatggggtcccccgactctggctttcccccaggtgtacatgttcctggtgaaatggcaggacctgtcggagaaggtggtctatcggcg

SEQ ID NO: 18776 - RNA, 91 nt, synthetic construct
  source 1..91: mol_type = other RNA
ctgaatggggtcccccgactctggctttcccccaggtgtacatgttcctggtgaaatggcaggacctgtcggagaaggtggtctataggcg

SEQ ID NO: 18777 - RNA, 91 nt, synthetic construct
  source 1..91: mol_type = other RNA
ctgaatggggtcccccgactctggctttcccccaggtgtacatgttcctggtgaaatggcaggacctgtcggagaaggtggtctatagacg

SEQ ID NO: 18778 - RNA, 91 nt, synthetic construct
  source 1..91: mol_type = other RNA
ctgaatggggtcccccgactctggctttcccccaggtgtacatgttcctggtgaaatggcaggacctgtcggagaaggtggtctaccggcg

SEQ ID NO: 18779 - RNA, 91 nt, synthetic construct
  source 1..91: mol_type = other RNA
ctgaatggggtcccccgactctggctttcccccaggtctacatgttcctggtgaaatggcaggacctgtcggagaaggtggtctatagacg

SEQ ID NO: 18780 - RNA, 91 nt, synthetic construct
  source 1..91: mol_type = other RNA
ctgaatggggtcccccgactctggctttcccccaggtctacatgttcctggtgaaatggcaggacctgtcggagaaggtggtctatcggcg

SEQ ID NO: 18781 - RNA, 91 nt, synthetic construct
  source 1..91: mol_type = other RNA
ctgaatggggtcccccgactctggctttcccccaggtctacatgttcctggtgaaatggcaggacctgtcggagaaggtggtctaccggcg

SEQ ID NO: 18782 - RNA, 91 nt, synthetic construct
  source 1..91: mol_type = other RNA
ctgaatggggtcccccgactctggctttcccccaggtctacatgttcctggtgaaatggcaggacctgtcggagaaggtggtctacaggcg

SEQ ID NO: 18783 - RNA, 91 nt, synthetic construct
  source 1..91: mol_type = other RNA
ctgaatggggtcccccgactctggctttcccccaggtatacatgttcctggtgaaatggcaggacctgtcggagaaggtggtctatcggcg

SEQ ID NO: 18784 - RNA, 91 nt, synthetic construct
  source 1..91: mol_type = other RNA
ctgaatggggtcccccgactctggctttcccccaggtgtacatgttcctggtgaaatggcaggacctgtcggagaaggtggtctacaggcg

SEQ ID NO: 18785 - RNA, 92 nt, synthetic construct
  source 1..92: mol_type = other RNA
gctgaatggggtcccccgactctggctttcccccaggtttacatgttcctggtgaaatggcaggacctgtcggagaaggtggtctaccggcg

SEQ ID NO: 18786 - RNA, 92 nt, synthetic construct
  source 1..92: mol_type = other RNA
gctgaatggggtcccccgactctggctttcccccaggtttacatgttcctggtgaaatggcaggacctgtcggagaaggtggtctatagacg

SEQ ID NO: 18787 - RNA, 92 nt, synthetic construct
  source 1..92: mol_type = other RNA
gctgaatggggtcccccgactctggctttcccccaggtatacatgttcctggtgaaatggcaggacctgtcggagaaggtggtctacagacg

SEQ ID NO: 18788 - RNA, 92 nt, synthetic construct
  source 1..92: mol_type = other RNA
gctgaatggggtcccccgactctggctttcccccaggtatacatgttcctggtgaaatggcaggacctgtcggagaaggtggtctacaggcg

SEQ ID NO: 18789 - RNA, 92 nt, synthetic construct
  source 1..92: mol_type = other RNA
gctgaatggggtcccccgactctggctttcccccaggtatacatgttcctggtgaaatggcaggacctgtcggagaaggtggtctatagacg

SEQ ID NO: 18790 - RNA, 92 nt, synthetic construct
  source 1..92: mol_type = other RNA
gctgaatggggtcccccgactctggctttcccccaggtatacatgttcctggtgaaatggcaggacctgtcggagaaggtggtctaccggcg

SEQ ID NO: 18791 - RNA, 92 nt, synthetic construct
  source 1..92: mol_type = other RNA
gctgaatggggtcccccgactctggctttcccccaggtgtacatgttcctggtgaaatggcaggacctgtcggagaaggtggtctatcggcg

SEQ ID NO: 18792 - RNA, 92 nt, synthetic construct
  source 1..92: mol_type = other RNA
gctgaatggggtcccccgactctggctttcccccaggtttacatgttcctggtgaaatggcaggacctgtcggagaaggtggtctacagacg

SEQ ID NO: 18793 - RNA, 92 nt, synthetic construct
  source 1..92: mol_type = other RNA
gctgaatggggtcccccgactctggctttcccccaggtatacatgttcctggtgaaatggcaggacctgtcggagaaggtggtctataggcg

SEQ ID NO: 18794 - RNA, 92 nt, synthetic construct
  source 1..92: mol_type = other RNA
gctgaatggggtcccccgactctggctttcccccaggtatacatgttcctggtgaaatggcaggacctgtcggagaaggtggtctatcggcg

SEQ ID NO: 18795 - RNA, 92 nt, synthetic construct
  source 1..92: mol_type = other RNA
gctgaatggggtcccccgactctggctttcccccaggtctacatgttcctggtgaaatggcaggacctgtcggagaaggtggtctacagacg

SEQ ID NO: 18796 - RNA, 92 nt, synthetic construct
  source 1..92: mol_type = other RNA
gctgaatggggtcccccgactctggctttcccccaggtctacatgttcctggtgaaatggcaggacctgtcggagaaggtggtctacaggcg

SEQ ID NO: 18797 - RNA, 92 nt, synthetic construct
  source 1..92: mol_type = other RNA
gctgaatggggtcccccgactctggctttcccccaggtctacatgttcctggtgaaatggcaggacctgtcggagaaggtggtctaccggcg

SEQ ID NO: 18798 - RNA, 92 nt, synthetic construct
  source 1..92: mol_type = other RNA
gctgaatggggtcccccgactctggctttcccccaggtctacatgttcctggtgaaatggcaggacctgtcggagaaggtggtctatagacg

SEQ ID NO: 18799 - RNA, 92 nt, synthetic construct
  source 1..92: mol_type = other RNA
gctgaatggggtcccccgactctggctttcccccaggtttacatgttcctggtgaaatggcaggacctgtcggagaaggtggtctacaggcg

SEQ ID NO: 18800 - RNA, 92 nt, synthetic construct
  source 1..92: mol_type = other RNA
gctgaatggggtcccccgactctggctttcccccaggtgtacatgttcctggtgaaatggcaggacctgtcggagaaggtggtctataggcg

SEQ ID NO: 18801 - RNA, 92 nt, synthetic construct
  source 1..92: mol_type = other RNA
gctgaatggggtcccccgactctggctttcccccaggtgtacatgttcctggtgaaatggcaggacctgtcggagaaggtggtctatagacg

SEQ ID NO: 18802 - RNA, 92 nt, synthetic construct
  source 1..92: mol_type = other RNA
gctgaatggggtcccccgactctggctttcccccaggtttacatgttcctggtgaaatggcaggacctgtcggagaaggtggtctataggcg

SEQ ID NO: 18803 - RNA, 92 nt, synthetic construct
  source 1..92: mol_type = other RNA
gctgaatggggtcccccgactctggctttcccccaggtgtacatgttcctggtgaaatggcaggacctgtcggagaaggtggtctacagacg

SEQ ID NO: 18804 - RNA, 92 nt, synthetic construct
  source 1..92: mol_type = other RNA
gctgaatggggtcccccgactctggctttcccccaggtgtacatgttcctggtgaaatggcaggacctgtcggagaaggtggtctacaggcg

SEQ ID NO: 18805 - RNA, 92 nt, synthetic construct
  source 1..92: mol_type = other RNA
gctgaatggggtcccccgactctggctttcccccaggtgtacatgttcctggtgaaatggcaggacctgtcggagaaggtggtctaccggcg

SEQ ID NO: 18806 - RNA, 92 nt, synthetic construct
  source 1..92: mol_type = other RNA
gctgaatggggtcccccgactctggctttcccccaggtctacatgttcctggtgaaatggcaggacctgtcggagaaggtggtctataggcg

SEQ ID NO: 18807 - RNA, 92 nt, synthetic construct
  source 1..92: mol_type = other RNA
gctgaatggggtcccccgactctggctttcccccaggtctacatgttcctggtgaaatggcaggacctgtcggagaaggtggtctatcggcg

SEQ ID NO: 18808 - RNA, 92 nt, synthetic construct
  source 1..92: mol_type = other RNA
gctgaatggggtcccccgactctggctttcccccaggtttacatgttcctggtgaaatggcaggacctgtcggagaaggtggtctatcggcg

SEQ ID NO: 18809 - RNA, 93 nt, synthetic construct
  source 1..93: mol_type = other RNA
ggctgaatggggtcccccgactctggctttcccccaggtgtacatgttcctggtgaaatggcaggacctgtcggagaaggtggtctataggcg

SEQ ID NO: 18810 - RNA, 93 nt, synthetic construct
  source 1..93: mol_type = other RNA
ggctgaatggggtcccccgactctggctttcccccaggtttacatgttcctggtgaaatggcaggacctgtcggagaaggtggtctatagacg

SEQ ID NO: 18811 - RNA, 93 nt, synthetic construct
  source 1..93: mol_type = other RNA
ggctgaatggggtcccccgactctggctttcccccaggtatacatgttcctggtgaaatggcaggacctgtcggagaaggtggtctataggcg

SEQ ID NO: 18812 - RNA, 93 nt, synthetic construct
  source 1..93: mol_type = other RNA
ggctgaatggggtcccccgactctggctttcccccaggtctacatgttcctggtgaaatggcaggacctgtcggagaaggtggtctaccggcg

SEQ ID NO: 18813 - RNA, 93 nt, synthetic construct
  source 1..93: mol_type = other RNA
ggctgaatggggtcccccgactctggctttcccccaggtgtacatgttcctggtgaaatggcaggacctgtcggagaaggtggtctacaggcg

SEQ ID NO: 18814 - RNA, 93 nt, synthetic construct
  source 1..93: mol_type = other RNA
ggctgaatggggtcccccgactctggctttcccccaggtatacatgttcctggtgaaatggcaggacctgtcggagaaggtggtctaccggcg

SEQ ID NO: 18815 - RNA, 93 nt, synthetic construct
  source 1..93: mol_type = other RNA
ggctgaatggggtcccccgactctggctttcccccaggtatacatgttcctggtgaaatggcaggacctgtcggagaaggtggtctatagacg

SEQ ID NO: 18816 - RNA, 93 nt, synthetic construct
  source 1..93: mol_type = other RNA
ggctgaatggggtcccccgactctggctttcccccaggtctacatgttcctggtgaaatggcaggacctgtcggagaaggtggtctacaggcg

SEQ ID NO: 18817 - RNA, 93 nt, synthetic construct
  source 1..93: mol_type = other RNA
ggctgaatggggtcccccgactctggctttcccccaggtgtacatgttcctggtgaaatggcaggacctgtcggagaaggtggtctaccggcg

SEQ ID NO: 18818 - RNA, 93 nt, synthetic construct
  source 1..93: mol_type = other RNA
ggctgaatggggtcccccgactctggctttcccccaggtctacatgttcctggtgaaatggcaggacctgtcggagaaggtggtctatagacg

SEQ ID NO: 18819 - RNA, 93 nt, synthetic construct
  source 1..93: mol_type = other RNA
ggctgaatggggtcccccgactctggctttcccccaggtctacatgttcctggtgaaatggcaggacctgtcggagaaggtggtctataggcg

SEQ ID NO: 18820 - RNA, 93 nt, synthetic construct
  source 1..93: mol_type = other RNA
ggctgaatggggtcccccgactctggctttcccccaggtctacatgttcctggtgaaatggcaggacctgtcggagaaggtggtctatcggcg

SEQ ID NO: 18821 - RNA, 93 nt, synthetic construct
  source 1..93: mol_type = other RNA
ggctgaatggggtcccccgactctggctttcccccaggtgtacatgttcctggtgaaatggcaggacctgtcggagaaggtggtctacagacg

SEQ ID NO: 18822 - RNA, 93 nt, synthetic construct
  source 1..93: mol_type = other RNA
ggctgaatggggtcccccgactctggctttcccccaggtgtacatgttcctggtgaaatggcaggacctgtcggagaaggtggtctatcggcg

SEQ ID NO: 18823 - RNA, 93 nt, synthetic construct
  source 1..93: mol_type = other RNA
ggctgaatggggtcccccgactctggctttcccccaggtttacatgttcctggtgaaatggcaggacctgtcggagaaggtggtctacagacg

SEQ ID NO: 18824 - RNA, 93 nt, synthetic construct
  source 1..93: mol_type = other RNA
ggctgaatggggtcccccgactctggctttcccccaggtttacatgttcctggtgaaatggcaggacctgtcggagaaggtggtctaccggcg

SEQ ID NO: 18825 - RNA, 93 nt, synthetic construct
  source 1..93: mol_type = other RNA
ggctgaatggggtcccccgactctggctttcccccaggtatacatgttcctggtgaaatggcaggacctgtcggagaaggtggtctacaggcg

SEQ ID NO: 18826 - RNA, 93 nt, synthetic construct
  source 1..93: mol_type = other RNA
ggctgaatggggtcccccgactctggctttcccccaggtgtacatgttcctggtgaaatggcaggacctgtcggagaaggtggtctatagacg

SEQ ID NO: 18827 - RNA, 93 nt, synthetic construct
  source 1..93: mol_type = other RNA
ggctgaatggggtcccccgactctggctttcccccaggtctacatgttcctggtgaaatggcaggacctgtcggagaaggtggtctacagacg

SEQ ID NO: 18828 - RNA, 93 nt, synthetic construct
  source 1..93: mol_type = other RNA
ggctgaatggggtcccccgactctggctttcccccaggtatacatgttcctggtgaaatggcaggacctgtcggagaaggtggtctacagacg

SEQ ID NO: 18829 - RNA, 93 nt, synthetic construct
  source 1..93: mol_type = other RNA
ggctgaatggggtcccccgactctggctttcccccaggtatacatgttcctggtgaaatggcaggacctgtcggagaaggtggtctatcggcg

SEQ ID NO: 18830 - RNA, 93 nt, synthetic construct
  source 1..93: mol_type = other RNA
ggctgaatggggtcccccgactctggctttcccccaggtttacatgttcctggtgaaatggcaggacctgtcggagaaggtggtctatcggcg

SEQ ID NO: 18831 - RNA, 93 nt, synthetic construct
  source 1..93: mol_type = other RNA
ggctgaatggggtcccccgactctggctttcccccaggtttacatgttcctggtgaaatggcaggacctgtcggagaaggtggtctataggcg

SEQ ID NO: 18832 - RNA, 93 nt, synthetic construct
  source 1..93: mol_type = other RNA
ggctgaatggggtcccccgactctggctttcccccaggtttacatgttcctggtgaaatggcaggacctgtcggagaaggtggtctacaggcg

SEQ ID NO: 18833 - RNA, 94 nt, synthetic construct
  source 1..94: mol_type = other RNA
aggctgaatggggtcccccgactctggctttcccccaggtctacatgttcctggtgaaatggcaggacctgtcggagaaggtggtctataggcg

SEQ ID NO: 18834 - RNA, 94 nt, synthetic construct
  source 1..94: mol_type = other RNA
aggctgaatggggtcccccgactctggctttcccccaggtatacatgttcctggtgaaatggcaggacctgtcggagaaggtggtctatcggcg

SEQ ID NO: 18835 - RNA, 94 nt, synthetic construct
  source 1..94: mol_type = other RNA
aggctgaatggggtcccccgactctggctttcccccaggtctacatgttcctggtgaaatggcaggacctgtcggagaaggtggtctacagacg

SEQ ID NO: 18836 - RNA, 94 nt, synthetic construct
  source 1..94: mol_type = other RNA
aggctgaatggggtcccccgactctggctttcccccaggtctacatgttcctggtgaaatggcaggacctgtcggagaaggtggtctacaggcg

SEQ ID NO: 18837 - RNA, 94 nt, synthetic construct
  source 1..94: mol_type = other RNA
aggctgaatggggtcccccgactctggctttcccccaggtctacatgttcctggtgaaatggcaggacctgtcggagaaggtggtctaccggcg

SEQ ID NO: 18838 - RNA, 94 nt, synthetic construct
  source 1..94: mol_type = other RNA
aggctgaatggggtcccccgactctggctttcccccaggtctacatgttcctggtgaaatggcaggacctgtcggagaaggtggtctatagacg

SEQ ID NO: 18839 - RNA, 94 nt, synthetic construct
  source 1..94: mol_type = other RNA
aggctgaatggggtcccccgactctggctttcccccaggtatacatgttcctggtgaaatggcaggacctgtcggagaaggtggtctatagacg

SEQ ID NO: 18840 - RNA, 94 nt, synthetic construct
  source 1..94: mol_type = other RNA
aggctgaatggggtcccccgactctggctttcccccaggtatacatgttcctggtgaaatggcaggacctgtcggagaaggtggtctataggcg

SEQ ID NO: 18841 - RNA, 94 nt, synthetic construct
  source 1..94: mol_type = other RNA
aggctgaatggggtcccccgactctggctttcccccaggtatacatgttcctggtgaaatggcaggacctgtcggagaaggtggtctaccggcg

SEQ ID NO: 18842 - RNA, 94 nt, synthetic construct
  source 1..94: mol_type = other RNA
aggctgaatggggtcccccgactctggctttcccccaggtatacatgttcctggtgaaatggcaggacctgtcggagaaggtggtctacaggcg

SEQ ID NO: 18843 - RNA, 94 nt, synthetic construct
  source 1..94: mol_type = other RNA
aggctgaatggggtcccccgactctggctttcccccaggtatacatgttcctggtgaaatggcaggacctgtcggagaaggtggtctacagacg

SEQ ID NO: 18844 - RNA, 94 nt, synthetic construct
  source 1..94: mol_type = other RNA
aggctgaatggggtcccccgactctggctttcccccaggtctacatgttcctggtgaaatggcaggacctgtcggagaaggtggtctatcggcg

SEQ ID NO: 18845 - RNA, 94 nt, synthetic construct
  source 1..94: mol_type = other RNA
aggctgaatggggtcccccgactctggctttcccccaggtgtacatgttcctggtgaaatggcaggacctgtcggagaaggtggtctataggcg

SEQ ID NO: 18846 - RNA, 94 nt, synthetic construct
  source 1..94: mol_type = other RNA
aggctgaatggggtcccccgactctggctttcccccaggtgtacatgttcctggtgaaatggcaggacctgtcggagaaggtggtctaccggcg

SEQ ID NO: 18847 - RNA, 94 nt, synthetic construct
  source 1..94: mol_type = other RNA
aggctgaatggggtcccccgactctggctttcccccaggtgtacatgttcctggtgaaatggcaggacctgtcggagaaggtggtctatagacg

SEQ ID NO: 18848 - RNA, 94 nt, synthetic construct
  source 1..94: mol_type = other RNA
aggctgaatggggtcccccgactctggctttcccccaggtgtacatgttcctggtgaaatggcaggacctgtcggagaaggtggtctatcggcg

SEQ ID NO: 18849 - RNA, 94 nt, synthetic construct
  source 1..94: mol_type = other RNA
aggctgaatggggtcccccgactctggctttcccccaggtttacatgttcctggtgaaatggcaggacctgtcggagaaggtggtctataggcg

SEQ ID NO: 18850 - RNA, 94 nt, synthetic construct
  source 1..94: mol_type = other RNA
aggctgaatggggtcccccgactctggctttcccccaggtttacatgttcctggtgaaatggcaggacctgtcggagaaggtggtctacaggcg

SEQ ID NO: 18851 - RNA, 94 nt, synthetic construct
  source 1..94: mol_type = other RNA
aggctgaatggggtcccccgactctggctttcccccaggtttacatgttcctggtgaaatggcaggacctgtcggagaaggtggtctaccggcg

SEQ ID NO: 18852 - RNA, 94 nt, synthetic construct
  source 1..94: mol_type = other RNA
aggctgaatggggtcccccgactctggctttcccccaggtttacatgttcctggtgaaatggcaggacctgtcggagaaggtggtctatagacg

SEQ ID NO: 18853 - RNA, 94 nt, synthetic construct
  source 1..94: mol_type = other RNA
aggctgaatggggtcccccgactctggctttcccccaggtttacatgttcctggtgaaatggcaggacctgtcggagaaggtggtctatcggcg

SEQ ID NO: 18854 - RNA, 94 nt, synthetic construct
  source 1..94: mol_type = other RNA
aggctgaatggggtcccccgactctggctttcccccaggtttacatgttcctggtgaaatggcaggacctgtcggagaaggtggtctacagacg

SEQ ID NO: 18855 - RNA, 94 nt, synthetic construct
  source 1..94: mol_type = other RNA
aggctgaatggggtcccccgactctggctttcccccaggtgtacatgttcctggtgaaatggcaggacctgtcggagaaggtggtctacaggcg

SEQ ID NO: 18856 - RNA, 94 nt, synthetic construct
  source 1..94: mol_type = other RNA
aggctgaatggggtcccccgactctggctttcccccaggtgtacatgttcctggtgaaatggcaggacctgtcggagaaggtggtctacagacg

SEQ ID NO: 18857 - RNA, 95 nt, synthetic construct
  source 1..95: mol_type = other RNA
gaggctgaatggggtcccccgactctggctttcccccaggtctacatgttcctggtgaaatggcaggacctgtcggagaaggtggtctataggcg

SEQ ID NO: 18858 - RNA, 95 nt, synthetic construct
  source 1..95: mol_type = other RNA
gaggctgaatggggtcccccgactctggctttcccccaggtctacatgttcctggtgaaatggcaggacctgtcggagaaggtggtctatagacg

SEQ ID NO: 18859 - RNA, 95 nt, synthetic construct
  source 1..95: mol_type = other RNA
gaggctgaatggggtcccccgactctggctttcccccaggtatacatgttcctggtgaaatggcaggacctgtcggagaaggtggtctacagacg

SEQ ID NO: 18860 - RNA, 95 nt, synthetic construct
  source 1..95: mol_type = other RNA
gaggctgaatggggtcccccgactctggctttcccccaggtttacatgttcctggtgaaatggcaggacctgtcggagaaggtggtctaccggcg

SEQ ID NO: 18861 - RNA, 95 nt, synthetic construct
  source 1..95: mol_type = other RNA
gaggctgaatggggtcccccgactctggctttcccccaggtatacatgttcctggtgaaatggcaggacctgtcggagaaggtggtctatagacg

SEQ ID NO: 18862 - RNA, 95 nt, synthetic construct
  source 1..95: mol_type = other RNA
gaggctgaatggggtcccccgactctggctttcccccaggtttacatgttcctggtgaaatggcaggacctgtcggagaaggtggtctacaggcg

SEQ ID NO: 18863 - RNA, 95 nt, synthetic construct
  source 1..95: mol_type = other RNA
gaggctgaatggggtcccccgactctggctttcccccaggtatacatgttcctggtgaaatggcaggacctgtcggagaaggtggtctataggcg

SEQ ID NO: 18864 - RNA, 95 nt, synthetic construct
  source 1..95: mol_type = other RNA
gaggctgaatggggtcccccgactctggctttcccccaggtgtacatgttcctggtgaaatggcaggacctgtcggagaaggtggtctatcggcg

SEQ ID NO: 18865 - RNA, 95 nt, synthetic construct
  source 1..95: mol_type = other RNA
gaggctgaatggggtcccccgactctggctttcccccaggtctacatgttcctggtgaaatggcaggacctgtcggagaaggtggtctacagacg

SEQ ID NO: 18866 - RNA, 95 nt, synthetic construct
  source 1..95: mol_type = other RNA
gaggctgaatggggtcccccgactctggctttcccccaggtctacatgttcctggtgaaatggcaggacctgtcggagaaggtggtctaccggcg

SEQ ID NO: 18867 - RNA, 95 nt, synthetic construct
  source 1..95: mol_type = other RNA
gaggctgaatggggtcccccgactctggctttcccccaggtctacatgttcctggtgaaatggcaggacctgtcggagaaggtggtctacaggcg

SEQ ID NO: 18868 - RNA, 95 nt, synthetic construct
  source 1..95: mol_type = other RNA
gaggctgaatggggtcccccgactctggctttcccccaggtgtacatgttcctggtgaaatggcaggacctgtcggagaaggtggtctataggcg

SEQ ID NO: 18869 - RNA, 95 nt, synthetic construct
  source 1..95: mol_type = other RNA
gaggctgaatggggtcccccgactctggctttcccccaggtctacatgttcctggtgaaatggcaggacctgtcggagaaggtggtctatcggcg

SEQ ID NO: 18870 - RNA, 95 nt, synthetic construct
  source 1..95: mol_type = other RNA
gaggctgaatggggtcccccgactctggctttcccccaggtgtacatgttcctggtgaaatggcaggacctgtcggagaaggtggtctacaggcg

SEQ ID NO: 18871 - RNA, 95 nt, synthetic construct
  source 1..95: mol_type = other RNA
gaggctgaatggggtcccccgactctggctttcccccaggtgtacatgttcctggtgaaatggcaggacctgtcggagaaggtggtctaccggcg

SEQ ID NO: 18872 - RNA, 95 nt, synthetic construct
  source 1..95: mol_type = other RNA
gaggctgaatggggtcccccgactctggctttcccccaggtgtacatgttcctggtgaaatggcaggacctgtcggagaaggtggtctatagacg

SEQ ID NO: 18873 - RNA, 95 nt, synthetic construct
  source 1..95: mol_type = other RNA
gaggctgaatggggtcccccgactctggctttcccccaggtgtacatgttcctggtgaaatggcaggacctgtcggagaaggtggtctacagacg

SEQ ID NO: 18874 - RNA, 95 nt, synthetic construct
  source 1..95: mol_type = other RNA
gaggctgaatggggtcccccgactctggctttcccccaggtatacatgttcctggtgaaatggcaggacctgtcggagaaggtggtctaccggcg

SEQ ID NO: 18875 - RNA, 95 nt, synthetic construct
  source 1..95: mol_type = other RNA
gaggctgaatggggtcccccgactctggctttcccccaggtttacatgttcctggtgaaatggcaggacctgtcggagaaggtggtctacagacg

SEQ ID NO: 18876 - RNA, 95 nt, synthetic construct
  source 1..95: mol_type = other RNA
gaggctgaatggggtcccccgactctggctttcccccaggtatacatgttcctggtgaaatggcaggacctgtcggagaaggtggtctacaggcg

SEQ ID NO: 18877 - RNA, 95 nt, synthetic construct
  source 1..95: mol_type = other RNA
gaggctgaatggggtcccccgactctggctttcccccaggtttacatgttcctggtgaaatggcaggacctgtcggagaaggtggtctataggcg

SEQ ID NO: 18878 - RNA, 95 nt, synthetic construct
  source 1..95: mol_type = other RNA
gaggctgaatggggtcccccgactctggctttcccccaggtttacatgttcctggtgaaatggcaggacctgtcggagaaggtggtctatcggcg

SEQ ID NO: 18879 - RNA, 95 nt, synthetic construct
  source 1..95: mol_type = other RNA
gaggctgaatggggtcccccgactctggctttcccccaggtttacatgttcctggtgaaatggcaggacctgtcggagaaggtggtctatagacg

SEQ ID NO: 18880 - RNA, 95 nt, synthetic construct
  source 1..95: mol_type = other RNA
gaggctgaatggggtcccccgactctggctttcccccaggtatacatgttcctggtgaaatggcaggacctgtcggagaaggtggtctatcggcg

SEQ ID NO: 18881 - RNA, 96 nt, synthetic construct
  source 1..96: mol_type = other RNA
ggaggctgaatggggtcccccgactctggctttcccccaggtttacatgttcctggtgaaatggcaggacctgtcggagaaggtggtctatagacg

SEQ ID NO: 18882 - RNA, 96 nt, synthetic construct
  source 1..96: mol_type = other RNA
ggaggctgaatggggtcccccgactctggctttcccccaggtttacatgttcctggtgaaatggcaggacctgtcggagaaggtggtctaccggcg

SEQ ID NO: 18883 - RNA, 96 nt, synthetic construct
  source 1..96: mol_type = other RNA
ggaggctgaatggggtcccccgactctggctttcccccaggtttacatgttcctggtgaaatggcaggacctgtcggagaaggtggtctacagacg

SEQ ID NO: 18884 - RNA, 96 nt, synthetic construct
  source 1..96: mol_type = other RNA
ggaggctgaatggggtcccccgactctggctttcccccaggtgtacatgttcctggtgaaatggcaggacctgtcggagaaggtggtctatcggcg

SEQ ID NO: 18885 - RNA, 96 nt, synthetic construct
  source 1..96: mol_type = other RNA
ggaggctgaatggggtcccccgactctggctttcccccaggtttacatgttcctggtgaaatggcaggacctgtcggagaaggtggtctacaggcg

SEQ ID NO: 18886 - RNA, 96 nt, synthetic construct
  source 1..96: mol_type = other RNA
ggaggctgaatggggtcccccgactctggctttcccccaggtgtacatgttcctggtgaaatggcaggacctgtcggagaaggtggtctatagacg

SEQ ID NO: 18887 - RNA, 96 nt, synthetic construct
  source 1..96: mol_type = other RNA
ggaggctgaatggggtcccccgactctggctttcccccaggtatacatgttcctggtgaaatggcaggacctgtcggagaaggtggtctatagacg

SEQ ID NO: 18888 - RNA, 96 nt, synthetic construct
  source 1..96: mol_type = other RNA
ggaggctgaatggggtcccccgactctggctttcccccaggtatacatgttcctggtgaaatggcaggacctgtcggagaaggtggtctaccggcg

SEQ ID NO: 18889 - RNA, 96 nt, synthetic construct
  source 1..96: mol_type = other RNA
ggaggctgaatggggtcccccgactctggctttcccccaggtgtacatgttcctggtgaaatggcaggacctgtcggagaaggtggtctataggcg

SEQ ID NO: 18890 - RNA, 96 nt, synthetic construct
  source 1..96: mol_type = other RNA
ggaggctgaatggggtcccccgactctggctttcccccaggtctacatgttcctggtgaaatggcaggacctgtcggagaaggtggtctacagacg

SEQ ID NO: 18891 - RNA, 96 nt, synthetic construct
  source 1..96: mol_type = other RNA
ggaggctgaatggggtcccccgactctggctttcccccaggtctacatgttcctggtgaaatggcaggacctgtcggagaaggtggtctacaggcg

SEQ ID NO: 18892 - RNA, 96 nt, synthetic construct
  source 1..96: mol_type = other RNA
ggaggctgaatggggtcccccgactctggctttcccccaggtatacatgttcctggtgaaatggcaggacctgtcggagaaggtggtctatcggcg

SEQ ID NO: 18893 - RNA, 96 nt, synthetic construct
  source 1..96: mol_type = other RNA
ggaggctgaatggggtcccccgactctggctttcccccaggtctacatgttcctggtgaaatggcaggacctgtcggagaaggtggtctatagacg

SEQ ID NO: 18894 - RNA, 96 nt, synthetic construct
  source 1..96: mol_type = other RNA
ggaggctgaatggggtcccccgactctggctttcccccaggtctacatgttcctggtgaaatggcaggacctgtcggagaaggtggtctataggcg

SEQ ID NO: 18895 - RNA, 96 nt, synthetic construct
  source 1..96: mol_type = other RNA
ggaggctgaatggggtcccccgactctggctttcccccaggtctacatgttcctggtgaaatggcaggacctgtcggagaaggtggtctatcggcg

SEQ ID NO: 18896 - RNA, 96 nt, synthetic construct
  source 1..96: mol_type = other RNA
ggaggctgaatggggtcccccgactctggctttcccccaggtttacatgttcctggtgaaatggcaggacctgtcggagaaggtggtctataggcg

SEQ ID NO: 18897 - RNA, 96 nt, synthetic construct
  source 1..96: mol_type = other RNA
ggaggctgaatggggtcccccgactctggctttcccccaggtgtacatgttcctggtgaaatggcaggacctgtcggagaaggtggtctacagacg

SEQ ID NO: 18898 - RNA, 96 nt, synthetic construct
  source 1..96: mol_type = other RNA
ggaggctgaatggggtcccccgactctggctttcccccaggtttacatgttcctggtgaaatggcaggacctgtcggagaaggtggtctatcggcg

SEQ ID NO: 18899 - RNA, 96 nt, synthetic construct
  source 1..96: mol_type = other RNA
ggaggctgaatggggtcccccgactctggctttcccccaggtgtacatgttcctggtgaaatggcaggacctgtcggagaaggtggtctaccggcg

SEQ ID NO: 18900 - RNA, 96 nt, synthetic construct
  source 1..96: mol_type = other RNA
ggaggctgaatggggtcccccgactctggctttcccccaggtctacatgttcctggtgaaatggcaggacctgtcggagaaggtggtctaccggcg

SEQ ID NO: 18901 - RNA, 96 nt, synthetic construct
  source 1..96: mol_type = other RNA
ggaggctgaatggggtcccccgactctggctttcccccaggtatacatgttcctggtgaaatggcaggacctgtcggagaaggtggtctacaggcg

SEQ ID NO: 18902 - RNA, 96 nt, synthetic construct
  source 1..96: mol_type = other RNA
ggaggctgaatggggtcccccgactctggctttcccccaggtatacatgttcctggtgaaatggcaggacctgtcggagaaggtggtctacagacg

SEQ ID NO: 18903 - RNA, 96 nt, synthetic construct
  source 1..96: mol_type = other RNA
ggaggctgaatggggtcccccgactctggctttcccccaggtgtacatgttcctggtgaaatggcaggacctgtcggagaaggtggtctacaggcg

SEQ ID NO: 18904 - RNA, 96 nt, synthetic construct
  source 1..96: mol_type = other RNA
ggaggctgaatggggtcccccgactctggctttcccccaggtatacatgttcctggtgaaatggcaggacctgtcggagaaggtggtctataggcg

SEQ ID NO: 18905 - RNA, 97 nt, synthetic construct
  source 1..97: mol_type = other RNA
tggaggctgaatggggtcccccgactctggctttcccccaggtatacatgttcctggtgaaatggcaggacctgtcggagaaggtggtctatagacg

SEQ ID NO: 18906 - RNA, 97 nt, synthetic construct
  source 1..97: mol_type = other RNA
tggaggctgaatggggtcccccgactctggctttcccccaggtatacatgttcctggtgaaatggcaggacctgtcggagaaggtggtctaccggcg

SEQ ID NO: 18907 - RNA, 97 nt, synthetic construct
  source 1..97: mol_type = other RNA
tggaggctgaatggggtcccccgactctggctttcccccaggtatacatgttcctggtgaaatggcaggacctgtcggagaaggtggtctatcggcg

SEQ ID NO: 18908 - RNA, 97 nt, synthetic construct
  source 1..97: mol_type = other RNA
tggaggctgaatggggtcccccgactctggctttcccccaggtgtacatgttcctggtgaaatggcaggacctgtcggagaaggtggtctaccggcg

SEQ ID NO: 18909 - RNA, 97 nt, synthetic construct
  source 1..97: mol_type = other RNA
tggaggctgaatggggtcccccgactctggctttcccccaggtctacatgttcctggtgaaatggcaggacctgtcggagaaggtggtctacagacg

SEQ ID NO: 18910 - RNA, 97 nt, synthetic construct
  source 1..97: mol_type = other RNA
tggaggctgaatggggtcccccgactctggctttcccccaggtctacatgttcctggtgaaatggcaggacctgtcggagaaggtggtctacaggcg

SEQ ID NO: 18911 - RNA, 97 nt, synthetic construct
  source 1..97: mol_type = other RNA
tggaggctgaatggggtcccccgactctggctttcccccaggtctacatgttcctggtgaaatggcaggacctgtcggagaaggtggtctaccggcg

SEQ ID NO: 18912 - RNA, 97 nt, synthetic construct
  source 1..97: mol_type = other RNA
tggaggctgaatggggtcccccgactctggctttcccccaggtctacatgttcctggtgaaatggcaggacctgtcggagaaggtggtctatagacg

SEQ ID NO: 18913 - RNA, 97 nt, synthetic construct
  source 1..97: mol_type = other RNA
tggaggctgaatggggtcccccgactctggctttcccccaggtctacatgttcctggtgaaatggcaggacctgtcggagaaggtggtctataggcg

SEQ ID NO: 18914 - RNA, 97 nt, synthetic construct
  source 1..97: mol_type = other RNA
tggaggctgaatggggtcccccgactctggctttcccccaggtatacatgttcctggtgaaatggcaggacctgtcggagaaggtggtctacaggcg

SEQ ID NO: 18915 - RNA, 97 nt, synthetic construct
  source 1..97: mol_type = other RNA
tggaggctgaatggggtcccccgactctggctttcccccaggtgtacatgttcctggtgaaatggcaggacctgtcggagaaggtggtctacaggcg

SEQ ID NO: 18916 - RNA, 97 nt, synthetic construct
  source 1..97: mol_type = other RNA
tggaggctgaatggggtcccccgactctggctttcccccaggtgtacatgttcctggtgaaatggcaggacctgtcggagaaggtggtctatagacg

SEQ ID NO: 18917 - RNA, 97 nt, synthetic construct
  source 1..97: mol_type = other RNA
tggaggctgaatggggtcccccgactctggctttcccccaggtgtacatgttcctggtgaaatggcaggacctgtcggagaaggtggtctataggcg

SEQ ID NO: 18918 - RNA, 97 nt, synthetic construct
  source 1..97: mol_type = other RNA
tggaggctgaatggggtcccccgactctggctttcccccaggtatacatgttcctggtgaaatggcaggacctgtcggagaaggtggtctataggcg

SEQ ID NO: 18919 - RNA, 97 nt, synthetic construct
  source 1..97: mol_type = other RNA
tggaggctgaatggggtcccccgactctggctttcccccaggtgtacatgttcctggtgaaatggcaggacctgtcggagaaggtggtctatcggcg

SEQ ID NO: 18920 - RNA, 97 nt, synthetic construct
  source 1..97: mol_type = other RNA
tggaggctgaatggggtcccccgactctggctttcccccaggtttacatgttcctggtgaaatggcaggacctgtcggagaaggtggtctacaggcg

SEQ ID NO: 18921 - RNA, 97 nt, synthetic construct
  source 1..97: mol_type = other RNA
tggaggctgaatggggtcccccgactctggctttcccccaggtttacatgttcctggtgaaatggcaggacctgtcggagaaggtggtctaccggcg

SEQ ID NO: 18922 - RNA, 97 nt, synthetic construct
  source 1..97: mol_type = other RNA
tggaggctgaatggggtcccccgactctggctttcccccaggtttacatgttcctggtgaaatggcaggacctgtcggagaaggtggtctatagacg

SEQ ID NO: 18923 - RNA, 97 nt, synthetic construct
  source 1..97: mol_type = other RNA
tggaggctgaatggggtcccccgactctggctttcccccaggtttacatgttcctggtgaaatggcaggacctgtcggagaaggtggtctataggcg

SEQ ID NO: 18924 - RNA, 97 nt, synthetic construct
  source 1..97: mol_type = other RNA
tggaggctgaatggggtcccccgactctggctttcccccaggtttacatgttcctggtgaaatggcaggacctgtcggagaaggtggtctatcggcg

SEQ ID NO: 18925 - RNA, 97 nt, synthetic construct
  source 1..97: mol_type = other RNA
tggaggctgaatggggtcccccgactctggctttcccccaggtatacatgttcctggtgaaatggcaggacctgtcggagaaggtggtctacagacg

SEQ ID NO: 18926 - RNA, 97 nt, synthetic construct
  source 1..97: mol_type = other RNA
tggaggctgaatggggtcccccgactctggctttcccccaggtgtacatgttcctggtgaaatggcaggacctgtcggagaaggtggtctacagacg

SEQ ID NO: 18927 - RNA, 97 nt, synthetic construct
  source 1..97: mol_type = other RNA
tggaggctgaatggggtcccccgactctggctttcccccaggtttacatgttcctggtgaaatggcaggacctgtcggagaaggtggtctacagacg

SEQ ID NO: 18928 - RNA, 97 nt, synthetic construct
  source 1..97: mol_type = other RNA
tggaggctgaatggggtcccccgactctggctttcccccaggtctacatgttcctggtgaaatggcaggacctgtcggagaaggtggtctatcggcg

SEQ ID NO: 18929 - RNA, 98 nt, synthetic construct
  source 1..98: mol_type = other RNA
ttggaggctgaatggggtcccccgactctggctttcccccaggtctacatgttcctggtgaaatggcaggacctgtcggagaaggtggtctatcggcg

SEQ ID NO: 18930 - RNA, 98 nt, synthetic construct
  source 1..98: mol_type = other RNA
ttggaggctgaatggggtcccccgactctggctttcccccaggtctacatgttcctggtgaaatggcaggacctgtcggagaaggtggtctataggcg

SEQ ID NO: 18931 - RNA, 98 nt, synthetic construct
  source 1..98: mol_type = other RNA
ttggaggctgaatggggtcccccgactctggctttcccccaggtttacatgttcctggtgaaatggcaggacctgtcggagaaggtggtctatcggcg

SEQ ID NO: 18932 - RNA, 98 nt, synthetic construct
  source 1..98: mol_type = other RNA
ttggaggctgaatggggtcccccgactctggctttcccccaggtctacatgttcctggtgaaatggcaggacctgtcggagaaggtggtctatagacg

SEQ ID NO: 18933 - RNA, 98 nt, synthetic construct
  source 1..98: mol_type = other RNA
ttggaggctgaatggggtcccccgactctggctttcccccaggtctacatgttcctggtgaaatggcaggacctgtcggagaaggtggtctacaggcg

SEQ ID NO: 18934 - RNA, 98 nt, synthetic construct
  source 1..98: mol_type = other RNA
ttggaggctgaatggggtcccccgactctggctttcccccaggtctacatgttcctggtgaaatggcaggacctgtcggagaaggtggtctacagacg

SEQ ID NO: 18935 - RNA, 98 nt, synthetic construct
  source 1..98: mol_type = other RNA
ttggaggctgaatggggtcccccgactctggctttcccccaggtatacatgttcctggtgaaatggcaggacctgtcggagaaggtggtctatcggcg

SEQ ID NO: 18936 - RNA, 98 nt, synthetic construct
  source 1..98: mol_type = other RNA
ttggaggctgaatggggtcccccgactctggctttcccccaggtatacatgttcctggtgaaatggcaggacctgtcggagaaggtggtctataggcg

SEQ ID NO: 18937 - RNA, 98 nt, synthetic construct
  source 1..98: mol_type = other RNA
ttggaggctgaatggggtcccccgactctggctttcccccaggtatacatgttcctggtgaaatggcaggacctgtcggagaaggtggtctacaggcg

SEQ ID NO: 18938 - RNA, 98 nt, synthetic construct
  source 1..98: mol_type = other RNA
ttggaggctgaatggggtcccccgactctggctttcccccaggtttacatgttcctggtgaaatggcaggacctgtcggagaaggtggtctaccggcg

SEQ ID NO: 18939 - RNA, 98 nt, synthetic construct
  source 1..98: mol_type = other RNA
ttggaggctgaatggggtcccccgactctggctttcccccaggtgtacatgttcctggtgaaatggcaggacctgtcggagaaggtggtctataggcg

SEQ ID NO: 18940 - RNA, 98 nt, synthetic construct
  source 1..98: mol_type = other RNA
ttggaggctgaatggggtcccccgactctggctttcccccaggtatacatgttcctggtgaaatggcaggacctgtcggagaaggtggtctatagacg

SEQ ID NO: 18941 - RNA, 98 nt, synthetic construct
  source 1..98: mol_type = other RNA
ttggaggctgaatggggtcccccgactctggctttcccccaggtctacatgttcctggtgaaatggcaggacctgtcggagaaggtggtctaccggcg

SEQ ID NO: 18942 - RNA, 98 nt, synthetic construct
  source 1..98: mol_type = other RNA
ttggaggctgaatggggtcccccgactctggctttcccccaggtatacatgttcctggtgaaatggcaggacctgtcggagaaggtggtctacagacg

SEQ ID NO: 18943 - RNA, 98 nt, synthetic construct
  source 1..98: mol_type = other RNA
ttggaggctgaatggggtcccccgactctggctttcccccaggtatacatgttcctggtgaaatggcaggacctgtcggagaaggtggtctaccggcg

SEQ ID NO: 18944 - RNA, 98 nt, synthetic construct
  source 1..98: mol_type = other RNA
ttggaggctgaatggggtcccccgactctggctttcccccaggtgtacatgttcctggtgaaatggcaggacctgtcggagaaggtggtctacagacg

SEQ ID NO: 18945 - RNA, 98 nt, synthetic construct
  source 1..98: mol_type = other RNA
ttggaggctgaatggggtcccccgactctggctttcccccaggtgtacatgttcctggtgaaatggcaggacctgtcggagaaggtggtctaccggcg

SEQ ID NO: 18946 - RNA, 98 nt, synthetic construct
  source 1..98: mol_type = other RNA
ttggaggctgaatggggtcccccgactctggctttcccccaggtgtacatgttcctggtgaaatggcaggacctgtcggagaaggtggtctacaggcg

SEQ ID NO: 18947 - RNA, 98 nt, synthetic construct
  source 1..98: mol_type = other RNA
ttggaggctgaatggggtcccccgactctggctttcccccaggtttacatgttcctggtgaaatggcaggacctgtcggagaaggtggtctataggcg

SEQ ID NO: 18948 - RNA, 98 nt, synthetic construct
  source 1..98: mol_type = other RNA
ttggaggctgaatggggtcccccgactctggctttcccccaggtttacatgttcctggtgaaatggcaggacctgtcggagaaggtggtctatagacg

SEQ ID NO: 18949 - RNA, 98 nt, synthetic construct
  source 1..98: mol_type = other RNA
ttggaggctgaatggggtcccccgactctggctttcccccaggtttacatgttcctggtgaaatggcaggacctgtcggagaaggtggtctacaggcg

SEQ ID NO: 18950 - RNA, 98 nt, synthetic construct
  source 1..98: mol_type = other RNA
ttggaggctgaatggggtcccccgactctggctttcccccaggtttacatgttcctggtgaaatggcaggacctgtcggagaaggtggtctacagacg

SEQ ID NO: 18951 - RNA, 98 nt, synthetic construct
  source 1..98: mol_type = other RNA
ttggaggctgaatggggtcccccgactctggctttcccccaggtgtacatgttcctggtgaaatggcaggacctgtcggagaaggtggtctatcggcg

SEQ ID NO: 18952 - RNA, 98 nt, synthetic construct
  source 1..98: mol_type = other RNA
ttggaggctgaatggggtcccccgactctggctttcccccaggtgtacatgttcctggtgaaatggcaggacctgtcggagaaggtggtctatagacg

SEQ ID NO: 18953 - RNA, 99 nt, synthetic construct
  source 1..99: mol_type = other RNA
tttggaggctgaatggggtcccccgactctggctttcccccaggtatacatgttcctggtgaaatggcaggacctgtcggagaaggtggtctacagacg

SEQ ID NO: 18954 - RNA, 99 nt, synthetic construct
  source 1..99: mol_type = other RNA
tttggaggctgaatggggtcccccgactctggctttcccccaggtttacatgttcctggtgaaatggcaggacctgtcggagaaggtggtctaccggcg

SEQ ID NO: 18955 - RNA, 99 nt, synthetic construct
  source 1..99: mol_type = other RNA
tttggaggctgaatggggtcccccgactctggctttcccccaggtgtacatgttcctggtgaaatggcaggacctgtcggagaaggtggtctatagacg

SEQ ID NO: 18956 - RNA, 99 nt, synthetic construct
  source 1..99: mol_type = other RNA
tttggaggctgaatggggtcccccgactctggctttcccccaggtgtacatgttcctggtgaaatggcaggacctgtcggagaaggtggtctataggcg

SEQ ID NO: 18957 - RNA, 99 nt, synthetic construct
  source 1..99: mol_type = other RNA
tttggaggctgaatggggtcccccgactctggctttcccccaggtgtacatgttcctggtgaaatggcaggacctgtcggagaaggtggtctaccggcg

SEQ ID NO: 18958 - RNA, 99 nt, synthetic construct
  source 1..99: mol_type = other RNA
tttggaggctgaatggggtcccccgactctggctttcccccaggtgtacatgttcctggtgaaatggcaggacctgtcggagaaggtggtctacaggcg

SEQ ID NO: 18959 - RNA, 99 nt, synthetic construct
  source 1..99: mol_type = other RNA
tttggaggctgaatggggtcccccgactctggctttcccccaggtgtacatgttcctggtgaaatggcaggacctgtcggagaaggtggtctacagacg

SEQ ID NO: 18960 - RNA, 99 nt, synthetic construct
  source 1..99: mol_type = other RNA
tttggaggctgaatggggtcccccgactctggctttcccccaggtgtacatgttcctggtgaaatggcaggacctgtcggagaaggtggtctatcggcg

SEQ ID NO: 18961 - RNA, 99 nt, synthetic construct
  source 1..99: mol_type = other RNA
tttggaggctgaatggggtcccccgactctggctttcccccaggtctacatgttcctggtgaaatggcaggacctgtcggagaaggtggtctaccggcg

SEQ ID NO: 18962 - RNA, 99 nt, synthetic construct
  source 1..99: mol_type = other RNA
tttggaggctgaatggggtcccccgactctggctttcccccaggtttacatgttcctggtgaaatggcaggacctgtcggagaaggtggtctacaggcg

SEQ ID NO: 18963 - RNA, 99 nt, synthetic construct
  source 1..99: mol_type = other RNA
tttggaggctgaatggggtcccccgactctggctttcccccaggtctacatgttcctggtgaaatggcaggacctgtcggagaaggtggtctatcggcg

SEQ ID NO: 18964 - RNA, 99 nt, synthetic construct
  source 1..99: mol_type = other RNA
tttggaggctgaatggggtcccccgactctggctttcccccaggtttacatgttcctggtgaaatggcaggacctgtcggagaaggtggtctatagacg

SEQ ID NO: 18965 - RNA, 99 nt, synthetic construct
  source 1..99: mol_type = other RNA
tttggaggctgaatggggtcccccgactctggctttcccccaggtctacatgttcctggtgaaatggcaggacctgtcggagaaggtggtctatagacg

SEQ ID NO: 18966 - RNA, 99 nt, synthetic construct
  source 1..99: mol_type = other RNA
tttggaggctgaatggggtcccccgactctggctttcccccaggtttacatgttcctggtgaaatggcaggacctgtcggagaaggtggtctataggcg

SEQ ID NO: 18967 - RNA, 99 nt, synthetic construct
  source 1..99: mol_type = other RNA
tttggaggctgaatggggtcccccgactctggctttcccccaggtttacatgttcctggtgaaatggcaggacctgtcggagaaggtggtctatcggcg

SEQ ID NO: 18968 - RNA, 99 nt, synthetic construct
  source 1..99: mol_type = other RNA
tttggaggctgaatggggtcccccgactctggctttcccccaggtatacatgttcctggtgaaatggcaggacctgtcggagaaggtggtctaccggcg

SEQ ID NO: 18969 - RNA, 99 nt, synthetic construct
  source 1..99: mol_type = other RNA
tttggaggctgaatggggtcccccgactctggctttcccccaggtttacatgttcctggtgaaatggcaggacctgtcggagaaggtggtctacagacg

SEQ ID NO: 18970 - RNA, 99 nt, synthetic construct
  source 1..99: mol_type = other RNA
tttggaggctgaatggggtcccccgactctggctttcccccaggtatacatgttcctggtgaaatggcaggacctgtcggagaaggtggtctatagacg

SEQ ID NO: 18971 - RNA, 99 nt, synthetic construct
  source 1..99: mol_type = other RNA
tttggaggctgaatggggtcccccgactctggctttcccccaggtctacatgttcctggtgaaatggcaggacctgtcggagaaggtggtctataggcg

SEQ ID NO: 18972 - RNA, 99 nt, synthetic construct
  source 1..99: mol_type = other RNA
tttggaggctgaatggggtcccccgactctggctttcccccaggtctacatgttcctggtgaaatggcaggacctgtcggagaaggtggtctacaggcg

SEQ ID NO: 18973 - RNA, 99 nt, synthetic construct
  source 1..99: mol_type = other RNA
tttggaggctgaatggggtcccccgactctggctttcccccaggtatacatgttcctggtgaaatggcaggacctgtcggagaaggtggtctacaggcg

SEQ ID NO: 18974 - RNA, 99 nt, synthetic construct
  source 1..99: mol_type = other RNA
tttggaggctgaatggggtcccccgactctggctttcccccaggtctacatgttcctggtgaaatggcaggacctgtcggagaaggtggtctacagacg

SEQ ID NO: 18975 - RNA, 99 nt, synthetic construct
  source 1..99: mol_type = other RNA
tttggaggctgaatggggtcccccgactctggctttcccccaggtatacatgttcctggtgaaatggcaggacctgtcggagaaggtggtctatcggcg

SEQ ID NO: 18976 - RNA, 99 nt, synthetic construct
  source 1..99: mol_type = other RNA
tttggaggctgaatggggtcccccgactctggctttcccccaggtatacatgttcctggtgaaatggcaggacctgtcggagaaggtggtctataggcg

SEQ ID NO: 18977 - RNA, 100 nt, synthetic construct
  source 1..100: mol_type = other RNA
ctttggaggctgaatggggtcccccgactctggctttcccccaggtctacatgttcctggtgaaatggcaggacctgtcggagaaggtggtctatagacg

SEQ ID NO: 18978 - RNA, 100 nt, synthetic construct
  source 1..100: mol_type = other RNA
ctttggaggctgaatggggtcccccgactctggctttcccccaggtatacatgttcctggtgaaatggcaggacctgtcggagaaggtggtctacaggcg

SEQ ID NO: 18979 - RNA, 100 nt, synthetic construct
  source 1..100: mol_type = other RNA
ctttggaggctgaatggggtcccccgactctggctttcccccaggtatacatgttcctggtgaaatggcaggacctgtcggagaaggtggtctaccggcg

SEQ ID NO: 18980 - RNA, 100 nt, synthetic construct
  source 1..100: mol_type = other RNA
ctttggaggctgaatggggtcccccgactctggctttcccccaggtatacatgttcctggtgaaatggcaggacctgtcggagaaggtggtctatagacg

SEQ ID NO: 18981 - RNA, 100 nt, synthetic construct
  source 1..100: mol_type = other RNA
ctttggaggctgaatggggtcccccgactctggctttcccccaggtatacatgttcctggtgaaatggcaggacctgtcggagaaggtggtctataggcg

SEQ ID NO: 18982 - RNA, 100 nt, synthetic construct
  source 1..100: mol_type = other RNA
ctttggaggctgaatggggtcccccgactctggctttcccccaggtatacatgttcctggtgaaatggcaggacctgtcggagaaggtggtctatcggcg

SEQ ID NO: 18983 - RNA, 100 nt, synthetic construct
  source 1..100: mol_type = other RNA
ctttggaggctgaatggggtcccccgactctggctttcccccaggtctacatgttcctggtgaaatggcaggacctgtcggagaaggtggtctacaggcg

SEQ ID NO: 18984 - RNA, 100 nt, synthetic construct
  source 1..100: mol_type = other RNA
ctttggaggctgaatggggtcccccgactctggctttcccccaggtgtacatgttcctggtgaaatggcaggacctgtcggagaaggtggtctacaggcg

SEQ ID NO: 18985 - RNA, 100 nt, synthetic construct
  source 1..100: mol_type = other RNA
ctttggaggctgaatggggtcccccgactctggctttcccccaggtctacatgttcctggtgaaatggcaggacctgtcggagaaggtggtctaccggcg

SEQ ID NO: 18986 - RNA, 100 nt, synthetic construct
  source 1..100: mol_type = other RNA
ctttggaggctgaatggggtcccccgactctggctttcccccaggtgtacatgttcctggtgaaatggcaggacctgtcggagaaggtggtctataggcg

SEQ ID NO: 18987 - RNA, 100 nt, synthetic construct
  source 1..100: mol_type = other RNA
ctttggaggctgaatggggtcccccgactctggctttcccccaggtgtacatgttcctggtgaaatggcaggacctgtcggagaaggtggtctatcggcg

SEQ ID NO: 18988 - RNA, 100 nt, synthetic construct
  source 1..100: mol_type = other RNA
ctttggaggctgaatggggtcccccgactctggctttcccccaggtttacatgttcctggtgaaatggcaggacctgtcggagaaggtggtctacagacg

SEQ ID NO: 18989 - RNA, 100 nt, synthetic construct
  source 1..100: mol_type = other RNA
ctttggaggctgaatggggtcccccgactctggctttcccccaggtgtacatgttcctggtgaaatggcaggacctgtcggagaaggtggtctatagacg

SEQ ID NO: 18990 - RNA, 100 nt, synthetic construct
  source 1..100: mol_type = other RNA
ctttggaggctgaatggggtcccccgactctggctttcccccaggtgtacatgttcctggtgaaatggcaggacctgtcggagaaggtggtctacagacg

SEQ ID NO: 18991 - RNA, 100 nt, synthetic construct
  source 1..100: mol_type = other RNA
ctttggaggctgaatggggtcccccgactctggctttcccccaggtctacatgttcctggtgaaatggcaggacctgtcggagaaggtggtctatcggcg

SEQ ID NO: 18992 - RNA, 100 nt, synthetic construct
  source 1..100: mol_type = other RNA
ctttggaggctgaatggggtcccccgactctggctttcccccaggtctacatgttcctggtgaaatggcaggacctgtcggagaaggtggtctataggcg

SEQ ID NO: 18993 - RNA, 100 nt, synthetic construct
  source 1..100: mol_type = other RNA
ctttggaggctgaatggggtcccccgactctggctttcccccaggtttacatgttcctggtgaaatggcaggacctgtcggagaaggtggtctatcggcg

SEQ ID NO: 18994 - RNA, 100 nt, synthetic construct
  source 1..100: mol_type = other RNA
ctttggaggctgaatggggtcccccgactctggctttcccccaggtatacatgttcctggtgaaatggcaggacctgtcggagaaggtggtctacagacg

SEQ ID NO: 18995 - RNA, 100 nt, synthetic construct
  source 1..100: mol_type = other RNA
ctttggaggctgaatggggtcccccgactctggctttcccccaggtttacatgttcctggtgaaatggcaggacctgtcggagaaggtggtctacaggcg

SEQ ID NO: 18996 - RNA, 100 nt, synthetic construct
  source 1..100: mol_type = other RNA
ctttggaggctgaatggggtcccccgactctggctttcccccaggtctacatgttcctggtgaaatggcaggacctgtcggagaaggtggtctacagacg

SEQ ID NO: 18997 - RNA, 100 nt, synthetic construct
  source 1..100: mol_type = other RNA
ctttggaggctgaatggggtcccccgactctggctttcccccaggtttacatgttcctggtgaaatggcaggacctgtcggagaaggtggtctaccggcg

SEQ ID NO: 18998 - RNA, 100 nt, synthetic construct
  source 1..100: mol_type = other RNA
ctttggaggctgaatggggtcccccgactctggctttcccccaggtgtacatgttcctggtgaaatggcaggacctgtcggagaaggtggtctaccggcg

SEQ ID NO: 18999 - RNA, 100 nt, synthetic construct
  source 1..100: mol_type = other RNA
ctttggaggctgaatggggtcccccgactctggctttcccccaggtttacatgttcctggtgaaatggcaggacctgtcggagaaggtggtctatagacg

SEQ ID NO: 19000 - RNA, 100 nt, synthetic construct
  source 1..100: mol_type = other RNA
ctttggaggctgaatggggtcccccgactctggctttcccccaggtttacatgttcctggtgaaatggcaggacctgtcggagaaggtggtctataggcg

SEQ ID NO: 19001 - RNA, 101 nt, synthetic construct
  source 1..101: mol_type = other RNA
tctttggaggctgaatggggtcccccgactctggctttcccccaggtgtacatgttcctggtgaaatggcaggacctgtcggagaaggtggtctataggcg

SEQ ID NO: 19002 - RNA, 101 nt, synthetic construct
  source 1..101: mol_type = other RNA
tctttggaggctgaatggggtcccccgactctggctttcccccaggtctacatgttcctggtgaaatggcaggacctgtcggagaaggtggtctataggcg

SEQ ID NO: 19003 - RNA, 101 nt, synthetic construct
  source 1..101: mol_type = other RNA
tctttggaggctgaatggggtcccccgactctggctttcccccaggtctacatgttcctggtgaaatggcaggacctgtcggagaaggtggtctatcggcg

SEQ ID NO: 19004 - RNA, 101 nt, synthetic construct
  source 1..101: mol_type = other RNA
tctttggaggctgaatggggtcccccgactctggctttcccccaggtatacatgttcctggtgaaatggcaggacctgtcggagaaggtggtctacaggcg

SEQ ID NO: 19005 - RNA, 101 nt, synthetic construct
  source 1..101: mol_type = other RNA
tctttggaggctgaatggggtcccccgactctggctttcccccaggtctacatgttcctggtgaaatggcaggacctgtcggagaaggtggtctaccggcg

SEQ ID NO: 19006 - RNA, 101 nt, synthetic construct
  source 1..101: mol_type = other RNA
tctttggaggctgaatggggtcccccgactctggctttcccccaggtatacatgttcctggtgaaatggcaggacctgtcggagaaggtggtctatagacg

SEQ ID NO: 19007 - RNA, 101 nt, synthetic construct
  source 1..101: mol_type = other RNA
tctttggaggctgaatggggtcccccgactctggctttcccccaggtatacatgttcctggtgaaatggcaggacctgtcggagaaggtggtctataggcg

SEQ ID NO: 19008 - RNA, 101 nt, synthetic construct
  source 1..101: mol_type = other RNA
tctttggaggctgaatggggtcccccgactctggctttcccccaggtatacatgttcctggtgaaatggcaggacctgtcggagaaggtggtctacagacg

SEQ ID NO: 19009 - RNA, 101 nt, synthetic construct
  source 1..101: mol_type = other RNA
tctttggaggctgaatggggtcccccgactctggctttcccccaggtctacatgttcctggtgaaatggcaggacctgtcggagaaggtggtctacagacg

SEQ ID NO: 19010 - RNA, 101 nt, synthetic construct
  source 1..101: mol_type = other RNA
tctttggaggctgaatggggtcccccgactctggctttcccccaggtctacatgttcctggtgaaatggcaggacctgtcggagaaggtggtctacaggcg

SEQ ID NO: 19011 - RNA, 101 nt, synthetic construct
  source 1..101: mol_type = other RNA
tctttggaggctgaatggggtcccccgactctggctttcccccaggtctacatgttcctggtgaaatggcaggacctgtcggagaaggtggtctatagacg

SEQ ID NO: 19012 - RNA, 101 nt, synthetic construct
  source 1..101: mol_type = other RNA
tctttggaggctgaatggggtcccccgactctggctttcccccaggtatacatgttcctggtgaaatggcaggacctgtcggagaaggtggtctatcggcg

SEQ ID NO: 19013 - RNA, 101 nt, synthetic construct
  source 1..101: mol_type = other RNA
tctttggaggctgaatggggtcccccgactctggctttcccccaggtatacatgttcctggtgaaatggcaggacctgtcggagaaggtggtctaccggcg

SEQ ID NO: 19014 - RNA, 101 nt, synthetic construct
  source 1..101: mol_type = other RNA
tctttggaggctgaatggggtcccccgactctggctttcccccaggtgtacatgttcctggtgaaatggcaggacctgtcggagaaggtggtctacaggcg

SEQ ID NO: 19015 - RNA, 101 nt, synthetic construct
  source 1..101: mol_type = other RNA
tctttggaggctgaatggggtcccccgactctggctttcccccaggtgtacatgttcctggtgaaatggcaggacctgtcggagaaggtggtctaccggcg

SEQ ID NO: 19016 - RNA, 101 nt, synthetic construct
  source 1..101: mol_type = other RNA
tctttggaggctgaatggggtcccccgactctggctttcccccaggtgtacatgttcctggtgaaatggcaggacctgtcggagaaggtggtctatagacg

SEQ ID NO: 19017 - RNA, 101 nt, synthetic construct
  source 1..101: mol_type = other RNA
tctttggaggctgaatggggtcccccgactctggctttcccccaggtttacatgttcctggtgaaatggcaggacctgtcggagaaggtggtctatcggcg

SEQ ID NO: 19018 - RNA, 101 nt, synthetic construct
  source 1..101: mol_type = other RNA
tctttggaggctgaatggggtcccccgactctggctttcccccaggtttacatgttcctggtgaaatggcaggacctgtcggagaaggtggtctataggcg

SEQ ID NO: 19019 - RNA, 101 nt, synthetic construct
  source 1..101: mol_type = other RNA
tctttggaggctgaatggggtcccccgactctggctttcccccaggtttacatgttcctggtgaaatggcaggacctgtcggagaaggtggtctatagacg

SEQ ID NO: 19020 - RNA, 101 nt, synthetic construct
  source 1..101: mol_type = other RNA
tctttggaggctgaatggggtcccccgactctggctttcccccaggtttacatgttcctggtgaaatggcaggacctgtcggagaaggtggtctaccggcg

SEQ ID NO: 19021 - RNA, 101 nt, synthetic construct
  source 1..101: mol_type = other RNA
tctttggaggctgaatggggtcccccgactctggctttcccccaggtttacatgttcctggtgaaatggcaggacctgtcggagaaggtggtctacaggcg

SEQ ID NO: 19022 - RNA, 101 nt, synthetic construct
  source 1..101: mol_type = other RNA
tctttggaggctgaatggggtcccccgactctggctttcccccaggtttacatgttcctggtgaaatggcaggacctgtcggagaaggtggtctacagacg

SEQ ID NO: 19023 - RNA, 101 nt, synthetic construct
  source 1..101: mol_type = other RNA
tctttggaggctgaatggggtcccccgactctggctttcccccaggtgtacatgttcctggtgaaatggcaggacctgtcggagaaggtggtctatcggcg

SEQ ID NO: 19024 - RNA, 101 nt, synthetic construct
  source 1..101: mol_type = other RNA
tctttggaggctgaatggggtcccccgactctggctttcccccaggtgtacatgttcctggtgaaatggcaggacctgtcggagaaggtggtctacagacg

SEQ ID NO: 19025 - RNA, 102 nt, synthetic construct
  source 1..102: mol_type = other RNA
ctctttggaggctgaatggggtcccccgactctggctttcccccaggtatacatgttcctggtgaaatggcaggacctgtcggagaaggtggtctacaggcg

SEQ ID NO: 19026 - RNA, 102 nt, synthetic construct
  source 1..102: mol_type = other RNA
ctctttggaggctgaatggggtcccccgactctggctttcccccaggtctacatgttcctggtgaaatggcaggacctgtcggagaaggtggtctataggcg

SEQ ID NO: 19027 - RNA, 102 nt, synthetic construct
  source 1..102: mol_type = other RNA
ctctttggaggctgaatggggtcccccgactctggctttcccccaggtctacatgttcctggtgaaatggcaggacctgtcggagaaggtggtctatcggcg

SEQ ID NO: 19028 - RNA, 102 nt, synthetic construct
  source 1..102: mol_type = other RNA
ctctttggaggctgaatggggtcccccgactctggctttcccccaggtgtacatgttcctggtgaaatggcaggacctgtcggagaaggtggtctaccggcg

SEQ ID NO: 19029 - RNA, 102 nt, synthetic construct
  source 1..102: mol_type = other RNA
ctctttggaggctgaatggggtcccccgactctggctttcccccaggtatacatgttcctggtgaaatggcaggacctgtcggagaaggtggtctaccggcg

SEQ ID NO: 19030 - RNA, 102 nt, synthetic construct
  source 1..102: mol_type = other RNA
ctctttggaggctgaatggggtcccccgactctggctttcccccaggtatacatgttcctggtgaaatggcaggacctgtcggagaaggtggtctatagacg

SEQ ID NO: 19031 - RNA, 102 nt, synthetic construct
  source 1..102: mol_type = other RNA
ctctttggaggctgaatggggtcccccgactctggctttcccccaggtatacatgttcctggtgaaatggcaggacctgtcggagaaggtggtctataggcg

SEQ ID NO: 19032 - RNA, 102 nt, synthetic construct
  source 1..102: mol_type = other RNA
ctctttggaggctgaatggggtcccccgactctggctttcccccaggtatacatgttcctggtgaaatggcaggacctgtcggagaaggtggtctatcggcg

SEQ ID NO: 19033 - RNA, 102 nt, synthetic construct
  source 1..102: mol_type = other RNA
ctctttggaggctgaatggggtcccccgactctggctttcccccaggtctacatgttcctggtgaaatggcaggacctgtcggagaaggtggtctacagacg

SEQ ID NO: 19034 - RNA, 102 nt, synthetic construct
  source 1..102: mol_type = other RNA
ctctttggaggctgaatggggtcccccgactctggctttcccccaggtctacatgttcctggtgaaatggcaggacctgtcggagaaggtggtctacaggcg

SEQ ID NO: 19035 - RNA, 102 nt, synthetic construct
  source 1..102: mol_type = other RNA
ctctttggaggctgaatggggtcccccgactctggctttcccccaggtctacatgttcctggtgaaatggcaggacctgtcggagaaggtggtctaccggcg

SEQ ID NO: 19036 - RNA, 102 nt, synthetic construct
  source 1..102: mol_type = other RNA
ctctttggaggctgaatggggtcccccgactctggctttcccccaggtctacatgttcctggtgaaatggcaggacctgtcggagaaggtggtctatagacg

SEQ ID NO: 19037 - RNA, 102 nt, synthetic construct
  source 1..102: mol_type = other RNA
ctctttggaggctgaatggggtcccccgactctggctttcccccaggtatacatgttcctggtgaaatggcaggacctgtcggagaaggtggtctacagacg

SEQ ID NO: 19038 - RNA, 102 nt, synthetic construct
  source 1..102: mol_type = other RNA
ctctttggaggctgaatggggtcccccgactctggctttcccccaggtttacatgttcctggtgaaatggcaggacctgtcggagaaggtggtctacaggcg

SEQ ID NO: 19039 - RNA, 102 nt, synthetic construct
  source 1..102: mol_type = other RNA
ctctttggaggctgaatggggtcccccgactctggctttcccccaggtgtacatgttcctggtgaaatggcaggacctgtcggagaaggtggtctacagacg

SEQ ID NO: 19040 - RNA, 102 nt, synthetic construct
  source 1..102: mol_type = other RNA
ctctttggaggctgaatggggtcccccgactctggctttcccccaggtttacatgttcctggtgaaatggcaggacctgtcggagaaggtggtctaccggcg

SEQ ID NO: 19041 - RNA, 102 nt, synthetic construct
  source 1..102: mol_type = other RNA
ctctttggaggctgaatggggtcccccgactctggctttcccccaggtgtacatgttcctggtgaaatggcaggacctgtcggagaaggtggtctataggcg

SEQ ID NO: 19042 - RNA, 102 nt, synthetic construct
  source 1..102: mol_type = other RNA
ctctttggaggctgaatggggtcccccgactctggctttcccccaggtgtacatgttcctggtgaaatggcaggacctgtcggagaaggtggtctatcggcg

SEQ ID NO: 19043 - RNA, 102 nt, synthetic construct
  source 1..102: mol_type = other RNA
ctctttggaggctgaatggggtcccccgactctggctttcccccaggtttacatgttcctggtgaaatggcaggacctgtcggagaaggtggtctacagacg

SEQ ID NO: 19044 - RNA, 102 nt, synthetic construct
  source 1..102: mol_type = other RNA
ctctttggaggctgaatggggtcccccgactctggctttcccccaggtgtacatgttcctggtgaaatggcaggacctgtcggagaaggtggtctatagacg

SEQ ID NO: 19045 - RNA, 102 nt, synthetic construct
  source 1..102: mol_type = other RNA
ctctttggaggctgaatggggtcccccgactctggctttcccccaggtttacatgttcctggtgaaatggcaggacctgtcggagaaggtggtctatagacg

SEQ ID NO: 19046 - RNA, 102 nt, synthetic construct
  source 1..102: mol_type = other RNA
ctctttggaggctgaatggggtcccccgactctggctttcccccaggtttacatgttcctggtgaaatggcaggacctgtcggagaaggtggtctataggcg

SEQ ID NO: 19047 - RNA, 102 nt, synthetic construct
  source 1..102: mol_type = other RNA
ctctttggaggctgaatggggtcccccgactctggctttcccccaggtttacatgttcctggtgaaatggcaggacctgtcggagaaggtggtctatcggcg

SEQ ID NO: 19048 - RNA, 102 nt, synthetic construct
  source 1..102: mol_type = other RNA
ctctttggaggctgaatggggtcccccgactctggctttcccccaggtgtacatgttcctggtgaaatggcaggacctgtcggagaaggtggtctacaggcg

SEQ ID NO: 19049 - RNA, 103 nt, synthetic construct
  source 1..103: mol_type = other RNA
cctctttggaggctgaatggggtcccccgactctggctttcccccaggtatacatgttcctggtgaaatggcaggacctgtcggagaaggtggtctacagacg

SEQ ID NO: 19050 - RNA, 103 nt, synthetic construct
  source 1..103: mol_type = other RNA
cctctttggaggctgaatggggtcccccgactctggctttcccccaggtgtacatgttcctggtgaaatggcaggacctgtcggagaaggtggtctaccggcg

SEQ ID NO: 19051 - RNA, 103 nt, synthetic construct
  source 1..103: mol_type = other RNA
cctctttggaggctgaatggggtcccccgactctggctttcccccaggtctacatgttcctggtgaaatggcaggacctgtcggagaaggtggtctatcggcg

SEQ ID NO: 19052 - RNA, 103 nt, synthetic construct
  source 1..103: mol_type = other RNA
cctctttggaggctgaatggggtcccccgactctggctttcccccaggtatacatgttcctggtgaaatggcaggacctgtcggagaaggtggtctacaggcg

SEQ ID NO: 19053 - RNA, 103 nt, synthetic construct
  source 1..103: mol_type = other RNA
cctctttggaggctgaatggggtcccccgactctggctttcccccaggtatacatgttcctggtgaaatggcaggacctgtcggagaaggtggtctaccggcg

SEQ ID NO: 19054 - RNA, 103 nt, synthetic construct
  source 1..103: mol_type = other RNA
cctctttggaggctgaatggggtcccccgactctggctttcccccaggtatacatgttcctggtgaaatggcaggacctgtcggagaaggtggtctataggcg

SEQ ID NO: 19055 - RNA, 103 nt, synthetic construct
  source 1..103: mol_type = other RNA
cctctttggaggctgaatggggtcccccgactctggctttcccccaggtgtacatgttcctggtgaaatggcaggacctgtcggagaaggtggtctatagacg

SEQ ID NO: 19056 - RNA, 103 nt, synthetic construct
  source 1..103: mol_type = other RNA
cctctttggaggctgaatggggtcccccgactctggctttcccccaggtgtacatgttcctggtgaaatggcaggacctgtcggagaaggtggtctataggcg

SEQ ID NO: 19057 - RNA, 103 nt, synthetic construct
  source 1..103: mol_type = other RNA
cctctttggaggctgaatggggtcccccgactctggctttcccccaggtgtacatgttcctggtgaaatggcaggacctgtcggagaaggtggtctatcggcg

SEQ ID NO: 19058 - RNA, 103 nt, synthetic construct
  source 1..103: mol_type = other RNA
cctctttggaggctgaatggggtcccccgactctggctttcccccaggtttacatgttcctggtgaaatggcaggacctgtcggagaaggtggtctatagacg

SEQ ID NO: 19059 - RNA, 103 nt, synthetic construct
  source 1..103: mol_type = other RNA
cctctttggaggctgaatggggtcccccgactctggctttcccccaggtttacatgttcctggtgaaatggcaggacctgtcggagaaggtggtctacaggcg

SEQ ID NO: 19060 - RNA, 103 nt, synthetic construct
  source 1..103: mol_type = other RNA
cctctttggaggctgaatggggtcccccgactctggctttcccccaggtttacatgttcctggtgaaatggcaggacctgtcggagaaggtggtctaccggcg

SEQ ID NO: 19061 - RNA, 103 nt, synthetic construct
  source 1..103: mol_type = other RNA
cctctttggaggctgaatggggtcccccgactctggctttcccccaggtttacatgttcctggtgaaatggcaggacctgtcggagaaggtggtctatcggcg

SEQ ID NO: 19062 - RNA, 103 nt, synthetic construct
  source 1..103: mol_type = other RNA
cctctttggaggctgaatggggtcccccgactctggctttcccccaggtgtacatgttcctggtgaaatggcaggacctgtcggagaaggtggtctacaggcg

SEQ ID NO: 19063 - RNA, 103 nt, synthetic construct
  source 1..103: mol_type = other RNA
cctctttggaggctgaatggggtcccccgactctggctttcccccaggtttacatgttcctggtgaaatggcaggacctgtcggagaaggtggtctacagacg

SEQ ID NO: 19064 - RNA, 103 nt, synthetic construct
  source 1..103: mol_type = other RNA
cctctttggaggctgaatggggtcccccgactctggctttcccccaggtctacatgttcctggtgaaatggcaggacctgtcggagaaggtggtctataggcg

SEQ ID NO: 19065 - RNA, 103 nt, synthetic construct
  source 1..103: mol_type = other RNA
cctctttggaggctgaatggggtcccccgactctggctttcccccaggtttacatgttcctggtgaaatggcaggacctgtcggagaaggtggtctataggcg

SEQ ID NO: 19066 - RNA, 103 nt, synthetic construct
  source 1..103: mol_type = other RNA
cctctttggaggctgaatggggtcccccgactctggctttcccccaggtctacatgttcctggtgaaatggcaggacctgtcggagaaggtggtctatagacg

SEQ ID NO: 19067 - RNA, 103 nt, synthetic construct
  source 1..103: mol_type = other RNA
cctctttggaggctgaatggggtcccccgactctggctttcccccaggtctacatgttcctggtgaaatggcaggacctgtcggagaaggtggtctaccggcg

SEQ ID NO: 19068 - RNA, 103 nt, synthetic construct
  source 1..103: mol_type = other RNA
cctctttggaggctgaatggggtcccccgactctggctttcccccaggtctacatgttcctggtgaaatggcaggacctgtcggagaaggtggtctacaggcg

SEQ ID NO: 19069 - RNA, 103 nt, synthetic construct
  source 1..103: mol_type = other RNA
cctctttggaggctgaatggggtcccccgactctggctttcccccaggtatacatgttcctggtgaaatggcaggacctgtcggagaaggtggtctatcggcg

SEQ ID NO: 19070 - RNA, 103 nt, synthetic construct
  source 1..103: mol_type = other RNA
cctctttggaggctgaatggggtcccccgactctggctttcccccaggtatacatgttcctggtgaaatggcaggacctgtcggagaaggtggtctatagacg

SEQ ID NO: 19071 - RNA, 103 nt, synthetic construct
  source 1..103: mol_type = other RNA
cctctttggaggctgaatggggtcccccgactctggctttcccccaggtgtacatgttcctggtgaaatggcaggacctgtcggagaaggtggtctacagacg

SEQ ID NO: 19072 - RNA, 103 nt, synthetic construct
  source 1..103: mol_type = other RNA
cctctttggaggctgaatggggtcccccgactctggctttcccccaggtctacatgttcctggtgaaatggcaggacctgtcggagaaggtggtctacagacg

SEQ ID NO: 19073 - RNA, 20 nt, synthetic construct
  source 1..20: mol_type = other RNA
gtcggagaaggtggtctaca

SEQ ID NO: 19074 - RNA, 20 nt, synthetic construct
  source 1..20: mol_type = other RNA
cggagaaggtggtctacagg

SEQ ID NO: 19075 - RNA, 20 nt, synthetic construct
  source 1..20: mol_type = other RNA
tgtcggagaaggtggtctat

SEQ ID NO: 19076 - RNA, 20 nt, synthetic construct
  source 1..20: mol_type = other RNA
cggagaaggtggtctacaga

SEQ ID NO: 19077 - RNA, 16 nt, synthetic construct
  source 1..16: mol_type = other RNA
actctggctttccccc

SEQ ID NO: 19078 - RNA, 17 nt, synthetic construct
  source 1..17: mol_type = other RNA
gactctggctttccccc

SEQ ID NO: 19079 - RNA, 18 nt, synthetic construct
  source 1..18: mol_type = other RNA
cgactctggctttccccc

SEQ ID NO: 19080 - RNA, 19 nt, synthetic construct
  source 1..19: mol_type = other RNA
ccgactctggctttccccc

SEQ ID NO: 19081 - RNA, 20 nt, synthetic construct
  source 1..20: mol_type = other RNA
cccgactctggctttccccc

SEQ ID NO: 19082 - RNA, 21 nt, synthetic construct
  source 1..21: mol_type = other RNA
ccccgactctggctttccccc

SEQ ID NO: 19083 - RNA, 22 nt, synthetic construct
  source 1..22: mol_type = other RNA
cccccgactctggctttccccc

SEQ ID NO: 19084-19089 - skipped (6 entries)

SEQ ID NO: 19090 - RNA, 10 nt, synthetic construct
  source 1..10: mol_type = other RNA
ggaaagccag

SEQ ID NO: 19091 - RNA, 11 nt, synthetic construct
  source 1..11: mol_type = other RNA
ggaaagccaga

SEQ ID NO: 19092 - RNA, 12 nt, synthetic construct
  source 1..12: mol_type = other RNA
ggaaagccagag

SEQ ID NO: 19093 - RNA, 13 nt, synthetic construct
  source 1..13: mol_type = other RNA
ggaaagccagagt

SEQ ID NO: 19094 - RNA, 14 nt, synthetic construct
  source 1..14: mol_type = other RNA
ggaaagccagagtc

SEQ ID NO: 19095 - RNA, 15 nt, synthetic construct
  source 1..15: mol_type = other RNA
ggaaagccagagtcg

SEQ ID NO: 19096 - RNA, 16 nt, synthetic construct
  source 1..16: mol_type = other RNA
ggaaagccagagtcgg

SEQ ID NO: 19097 - RNA, 17 nt, synthetic construct
  source 1..17: mol_type = other RNA
ggaaagccagagtcggg

SEQ ID NO: 19098 - RNA, 18 nt, synthetic construct
  source 1..18: mol_type = other RNA
ggaaagccagagtcgggg

SEQ ID NO: 19099 - RNA, 19 nt, synthetic construct
  source 1..19: mol_type = other RNA
ggaaagccagagtcggggg

SEQ ID NO: 19100 - RNA, 10 nt, synthetic construct
  source 1..10: mol_type = other RNA
taaacctggg

SEQ ID NO: 19101 - RNA, 10 nt, synthetic construct
  source 1..10: mol_type = other RNA
tatacctggg

SEQ ID NO: 19102 - RNA, 10 nt, synthetic construct
  source 1..10: mol_type = other RNA
tagacctggg

SEQ ID NO: 19103 - RNA, 10 nt, synthetic construct
  source 1..10: mol_type = other RNA
tacacctggg

SEQ ID NO: 19104 - RNA, 11 nt, synthetic construct
  source 1..11: mol_type = other RNA
gtaaacctggg

SEQ ID NO: 19105 - RNA, 11 nt, synthetic construct
  source 1..11: mol_type = other RNA
gtagacctggg

SEQ ID NO: 19106 - RNA, 11 nt, synthetic construct
  source 1..11: mol_type = other RNA
gtacacctggg

SEQ ID NO: 19107 - RNA, 11 nt, synthetic construct
  source 1..11: mol_type = other RNA
gtatacctggg

SEQ ID NO: 19108 - RNA, 12 nt, synthetic construct
  source 1..12: mol_type = other RNA
tgtacacctggg

SEQ ID NO: 19109 - RNA, 12 nt, synthetic construct
  source 1..12: mol_type = other RNA
tgtagacctggg

SEQ ID NO: 19110 - RNA, 12 nt, synthetic construct
  source 1..12: mol_type = other RNA
tgtaaacctggg

SEQ ID NO: 19111 - RNA, 12 nt, synthetic construct
  source 1..12: mol_type = other RNA
tgtatacctggg

SEQ ID NO: 19112 - RNA, 13 nt, synthetic construct
  source 1..13: mol_type = other RNA
atgtacacctggg

SEQ ID NO: 19113 - RNA, 13 nt, synthetic construct
  source 1..13: mol_type = other RNA
atgtatacctggg

SEQ ID NO: 19114 - RNA, 13 nt, synthetic construct
  source 1..13: mol_type = other RNA
atgtagacctggg

SEQ ID NO: 19115 - RNA, 13 nt, synthetic construct
  source 1..13: mol_type = other RNA
atgtaaacctggg

SEQ ID NO: 19116 - RNA, 14 nt, synthetic construct
  source 1..14: mol_type = other RNA
catgtacacctggg

SEQ ID NO: 19117 - RNA, 14 nt, synthetic construct
  source 1..14: mol_type = other RNA
catgtatacctggg

SEQ ID NO: 19118 - RNA, 14 nt, synthetic construct
  source 1..14: mol_type = other RNA
catgtaaacctggg

SEQ ID NO: 19119 - RNA, 14 nt, synthetic construct
  source 1..14: mol_type = other RNA
catgtagacctggg

SEQ ID NO: 19120 - RNA, 15 nt, synthetic construct
  source 1..15: mol_type = other RNA
acatgtaaacctggg

SEQ ID NO: 19121 - RNA, 15 nt, synthetic construct
  source 1..15: mol_type = other RNA
acatgtatacctggg

SEQ ID NO: 19122 - RNA, 15 nt, synthetic construct
  source 1..15: mol_type = other RNA
acatgtagacctggg

SEQ ID NO: 19123 - RNA, 15 nt, synthetic construct
  source 1..15: mol_type = other RNA
acatgtacacctggg

SEQ ID NO: 19124 - RNA, 16 nt, synthetic construct
  source 1..16: mol_type = other RNA
aacatgtagacctggg

SEQ ID NO: 19125 - RNA, 16 nt, synthetic construct
  source 1..16: mol_type = other RNA
aacatgtatacctggg

SEQ ID NO: 19126 - RNA, 16 nt, synthetic construct
  source 1..16: mol_type = other RNA
aacatgtacacctggg

SEQ ID NO: 19127 - RNA, 16 nt, synthetic construct
  source 1..16: mol_type = other RNA
aacatgtaaacctggg

SEQ ID NO: 19128 - RNA, 17 nt, synthetic construct
  source 1..17: mol_type = other RNA
gaacatgtagacctggg

SEQ ID NO: 19129 - RNA, 17 nt, synthetic construct
  source 1..17: mol_type = other RNA
gaacatgtacacctggg

SEQ ID NO: 19130 - RNA, 17 nt, synthetic construct
  source 1..17: mol_type = other RNA
gaacatgtaaacctggg

SEQ ID NO: 19131 - RNA, 17 nt, synthetic construct
  source 1..17: mol_type = other RNA
gaacatgtatacctggg

SEQ ID NO: 19132 - RNA, 18 nt, synthetic construct
  source 1..18: mol_type = other RNA
ggaacatgtagacctggg

SEQ ID NO: 19133 - RNA, 18 nt, synthetic construct
  source 1..18: mol_type = other RNA
ggaacatgtacacctggg

SEQ ID NO: 19134 - RNA, 18 nt, synthetic construct
  source 1..18: mol_type = other RNA
ggaacatgtaaacctggg

SEQ ID NO: 19135 - RNA, 18 nt, synthetic construct
  source 1..18: mol_type = other RNA
ggaacatgtatacctggg

SEQ ID NO: 19136 - RNA, 19 nt, synthetic construct
  source 1..19: mol_type = other RNA
aggaacatgtacacctggg

SEQ ID NO: 19137 - RNA, 19 nt, synthetic construct
  source 1..19: mol_type = other RNA
aggaacatgtagacctggg

SEQ ID NO: 19138 - RNA, 19 nt, synthetic construct
  source 1..19: mol_type = other RNA
aggaacatgtaaacctggg

SEQ ID NO: 19139 - RNA, 19 nt, synthetic construct
  source 1..19: mol_type = other RNA
aggaacatgtatacctggg

SEQ ID NO: 19140 - RNA, 20 nt, synthetic construct
  source 1..20: mol_type = other RNA
caggaacatgtagacctggg

SEQ ID NO: 19141 - RNA, 20 nt, synthetic construct
  source 1..20: mol_type = other RNA
caggaacatgtatacctggg

SEQ ID NO: 19142 - RNA, 20 nt, synthetic construct
  source 1..20: mol_type = other RNA
caggaacatgtacacctggg

SEQ ID NO: 19143 - RNA, 20 nt, synthetic construct
  source 1..20: mol_type = other RNA
caggaacatgtaaacctggg

SEQ ID NO: 19144 - RNA, 21 nt, synthetic construct
  source 1..21: mol_type = other RNA
ccaggaacatgtacacctggg

SEQ ID NO: 19145 - RNA, 21 nt, synthetic construct
  source 1..21: mol_type = other RNA
ccaggaacatgtagacctggg

SEQ ID NO: 19146 - RNA, 21 nt, synthetic construct
  source 1..21: mol_type = other RNA
ccaggaacatgtatacctggg

SEQ ID NO: 19147 - RNA, 21 nt, synthetic construct
  source 1..21: mol_type = other RNA
ccaggaacatgtaaacctggg

SEQ ID NO: 19148 - RNA, 22 nt, synthetic construct
  source 1..22: mol_type = other RNA
accaggaacatgtaaacctggg

SEQ ID NO: 19149 - RNA, 22 nt, synthetic construct
  source 1..22: mol_type = other RNA
accaggaacatgtagacctggg

SEQ ID NO: 19150 - RNA, 22 nt, synthetic construct
  source 1..22: mol_type = other RNA
accaggaacatgtacacctggg

SEQ ID NO: 19151 - RNA, 22 nt, synthetic construct
  source 1..22: mol_type = other RNA
accaggaacatgtatacctggg

SEQ ID NO: 19152 - RNA, 23 nt, synthetic construct
  source 1..23: mol_type = other RNA
caccaggaacatgtagacctggg

SEQ ID NO: 19153 - RNA, 23 nt, synthetic construct
  source 1..23: mol_type = other RNA
caccaggaacatgtatacctggg

SEQ ID NO: 19154 - RNA, 23 nt, synthetic construct
  source 1..23: mol_type = other RNA
caccaggaacatgtacacctggg

SEQ ID NO: 19155 - RNA, 23 nt, synthetic construct
  source 1..23: mol_type = other RNA
caccaggaacatgtaaacctggg

SEQ ID NO: 19156 - RNA, 24 nt, synthetic construct
  source 1..24: mol_type = other RNA
tcaccaggaacatgtaaacctggg

SEQ ID NO: 19157 - RNA, 24 nt, synthetic construct
  source 1..24: mol_type = other RNA
tcaccaggaacatgtatacctggg

SEQ ID NO: 19158 - RNA, 24 nt, synthetic construct
  source 1..24: mol_type = other RNA
tcaccaggaacatgtagacctggg

SEQ ID NO: 19159 - RNA, 24 nt, synthetic construct
  source 1..24: mol_type = other RNA
tcaccaggaacatgtacacctggg

SEQ ID NO: 19160 - RNA, 25 nt, synthetic construct
  source 1..25: mol_type = other RNA
ttcaccaggaacatgtacacctggg

SEQ ID NO: 19161 - RNA, 25 nt, synthetic construct
  source 1..25: mol_type = other RNA
ttcaccaggaacatgtaaacctggg

SEQ ID NO: 19162 - RNA, 25 nt, synthetic construct
  source 1..25: mol_type = other RNA
ttcaccaggaacatgtagacctggg

SEQ ID NO: 19163 - RNA, 25 nt, synthetic construct
  source 1..25: mol_type = other RNA
ttcaccaggaacatgtatacctggg

SEQ ID NO: 19164 - RNA, 26 nt, synthetic construct
  source 1..26: mol_type = other RNA
tttcaccaggaacatgtagacctggg

SEQ ID NO: 19165 - RNA, 26 nt, synthetic construct
  source 1..26: mol_type = other RNA
tttcaccaggaacatgtacacctggg

SEQ ID NO: 19166 - RNA, 26 nt, synthetic construct
  source 1..26: mol_type = other RNA
tttcaccaggaacatgtatacctggg

SEQ ID NO: 19167 - RNA, 26 nt, synthetic construct
  source 1..26: mol_type = other RNA
tttcaccaggaacatgtaaacctggg

SEQ ID NO: 19168 - RNA, 27 nt, synthetic construct
  source 1..27: mol_type = other RNA
atttcaccaggaacatgtaaacctggg

SEQ ID NO: 19169 - RNA, 27 nt, synthetic construct
  source 1..27: mol_type = other RNA
atttcaccaggaacatgtacacctggg

SEQ ID NO: 19170 - RNA, 27 nt, synthetic construct
  source 1..27: mol_type = other RNA
atttcaccaggaacatgtatacctggg

SEQ ID NO: 19171 - RNA, 27 nt, synthetic construct
  source 1..27: mol_type = other RNA
atttcaccaggaacatgtagacctggg

SEQ ID NO: 19172 - RNA, 28 nt, synthetic construct
  source 1..28: mol_type = other RNA
catttcaccaggaacatgtatacctggg

SEQ ID NO: 19173 - RNA, 28 nt, synthetic construct
  source 1..28: mol_type = other RNA
catttcaccaggaacatgtagacctggg

SEQ ID NO: 19174 - RNA, 28 nt, synthetic construct
  source 1..28: mol_type = other RNA
catttcaccaggaacatgtacacctggg

SEQ ID NO: 19175 - RNA, 28 nt, synthetic construct
  source 1..28: mol_type = other RNA
catttcaccaggaacatgtaaacctggg

SEQ ID NO: 19176 - RNA, 29 nt, synthetic construct
  source 1..29: mol_type = other RNA
ccatttcaccaggaacatgtacacctggg

SEQ ID NO: 19177 - RNA, 29 nt, synthetic construct
  source 1..29: mol_type = other RNA
ccatttcaccaggaacatgtatacctggg

SEQ ID NO: 19178 - RNA, 29 nt, synthetic construct
  source 1..29: mol_type = other RNA
ccatttcaccaggaacatgtaaacctggg

SEQ ID NO: 19179 - RNA, 29 nt, synthetic construct
  source 1..29: mol_type = other RNA
ccatttcaccaggaacatgtagacctggg

SEQ ID NO: 19180 - RNA, 30 nt, synthetic construct
  source 1..30: mol_type = other RNA
gccatttcaccaggaacatgtacacctggg

SEQ ID NO: 19181 - RNA, 30 nt, synthetic construct
  source 1..30: mol_type = other RNA
gccatttcaccaggaacatgtaaacctggg

SEQ ID NO: 19182 - RNA, 30 nt, synthetic construct
  source 1..30: mol_type = other RNA
gccatttcaccaggaacatgtatacctggg

SEQ ID NO: 19183 - RNA, 30 nt, synthetic construct
  source 1..30: mol_type = other RNA
gccatttcaccaggaacatgtagacctggg

SEQ ID NO: 19184 - RNA, 31 nt, synthetic construct
  source 1..31: mol_type = other RNA
tgccatttcaccaggaacatgtatacctggg

SEQ ID NO: 19185 - RNA, 31 nt, synthetic construct
  source 1..31: mol_type = other RNA
tgccatttcaccaggaacatgtacacctggg

SEQ ID NO: 19186 - RNA, 31 nt, synthetic construct
  source 1..31: mol_type = other RNA
tgccatttcaccaggaacatgtaaacctggg

SEQ ID NO: 19187 - RNA, 31 nt, synthetic construct
  source 1..31: mol_type = other RNA
tgccatttcaccaggaacatgtagacctggg

SEQ ID NO: 19188 - RNA, 32 nt, synthetic construct
  source 1..32: mol_type = other RNA
ctgccatttcaccaggaacatgtatacctggg

SEQ ID NO: 19189 - RNA, 32 nt, synthetic construct
  source 1..32: mol_type = other RNA
ctgccatttcaccaggaacatgtagacctggg

SEQ ID NO: 19190 - RNA, 32 nt, synthetic construct
  source 1..32: mol_type = other RNA
ctgccatttcaccaggaacatgtacacctggg

SEQ ID NO: 19191 - RNA, 32 nt, synthetic construct
  source 1..32: mol_type = other RNA
ctgccatttcaccaggaacatgtaaacctggg

SEQ ID NO: 19192 - RNA, 33 nt, synthetic construct
  source 1..33: mol_type = other RNA
cctgccatttcaccaggaacatgtatacctggg

SEQ ID NO: 19193 - RNA, 33 nt, synthetic construct
  source 1..33: mol_type = other RNA
cctgccatttcaccaggaacatgtagacctggg

SEQ ID NO: 19194 - RNA, 33 nt, synthetic construct
  source 1..33: mol_type = other RNA
cctgccatttcaccaggaacatgtacacctggg

SEQ ID NO: 19195 - RNA, 33 nt, synthetic construct
  source 1..33: mol_type = other RNA
cctgccatttcaccaggaacatgtaaacctggg

SEQ ID NO: 19196 - RNA, 34 nt, synthetic construct
  source 1..34: mol_type = other RNA
tcctgccatttcaccaggaacatgtatacctggg

SEQ ID NO: 19197 - RNA, 34 nt, synthetic construct
  source 1..34: mol_type = other RNA
tcctgccatttcaccaggaacatgtacacctggg

SEQ ID NO: 19198 - RNA, 34 nt, synthetic construct
  source 1..34: mol_type = other RNA
tcctgccatttcaccaggaacatgtagacctggg

SEQ ID NO: 19199 - RNA, 34 nt, synthetic construct
  source 1..34: mol_type = other RNA
tcctgccatttcaccaggaacatgtaaacctggg

SEQ ID NO: 19200 - RNA, 35 nt, synthetic construct
  source 1..35: mol_type = other RNA
gtcctgccatttcaccaggaacatgtagacctggg

SEQ ID NO: 19201 - RNA, 35 nt, synthetic construct
  source 1..35: mol_type = other RNA
gtcctgccatttcaccaggaacatgtatacctggg

SEQ ID NO: 19202 - RNA, 35 nt, synthetic construct
  source 1..35: mol_type = other RNA
gtcctgccatttcaccaggaacatgtaaacctggg

SEQ ID NO: 19203 - RNA, 35 nt, synthetic construct
  source 1..35: mol_type = other RNA
gtcctgccatttcaccaggaacatgtacacctggg

SEQ ID NO: 19204 - RNA, 36 nt, synthetic construct
  source 1..36: mol_type = other RNA
ggtcctgccatttcaccaggaacatgtatacctggg

SEQ ID NO: 19205 - RNA, 36 nt, synthetic construct
  source 1..36: mol_type = other RNA
ggtcctgccatttcaccaggaacatgtaaacctggg

SEQ ID NO: 19206 - RNA, 36 nt, synthetic construct
  source 1..36: mol_type = other RNA
ggtcctgccatttcaccaggaacatgtacacctggg

SEQ ID NO: 19207 - RNA, 36 nt, synthetic construct
  source 1..36: mol_type = other RNA
ggtcctgccatttcaccaggaacatgtagacctggg

SEQ ID NO: 19208 - RNA, 37 nt, synthetic construct
  source 1..37: mol_type = other RNA
aggtcctgccatttcaccaggaacatgtatacctggg

SEQ ID NO: 19209 - RNA, 37 nt, synthetic construct
  source 1..37: mol_type = other RNA
aggtcctgccatttcaccaggaacatgtaaacctggg

SEQ ID NO: 19210 - RNA, 37 nt, synthetic construct
  source 1..37: mol_type = other RNA
aggtcctgccatttcaccaggaacatgtagacctggg

SEQ ID NO: 19211 - RNA, 37 nt, synthetic construct
  source 1..37: mol_type = other RNA
aggtcctgccatttcaccaggaacatgtacacctggg

SEQ ID NO: 19212 - RNA, 38 nt, synthetic construct
  source 1..38: mol_type = other RNA
caggtcctgccatttcaccaggaacatgtaaacctggg

SEQ ID NO: 19213 - RNA, 38 nt, synthetic construct
  source 1..38: mol_type = other RNA
caggtcctgccatttcaccaggaacatgtagacctggg

SEQ ID NO: 19214 - RNA, 38 nt, synthetic construct
  source 1..38: mol_type = other RNA
caggtcctgccatttcaccaggaacatgtacacctggg

SEQ ID NO: 19215 - RNA, 38 nt, synthetic construct
  source 1..38: mol_type = other RNA
caggtcctgccatttcaccaggaacatgtatacctggg

SEQ ID NO: 19216 - RNA, 39 nt, synthetic construct
  source 1..39: mol_type = other RNA
acaggtcctgccatttcaccaggaacatgtacacctggg

SEQ ID NO: 19217 - RNA, 39 nt, synthetic construct
  source 1..39: mol_type = other RNA
acaggtcctgccatttcaccaggaacatgtagacctggg

SEQ ID NO: 19218 - RNA, 39 nt, synthetic construct
  source 1..39: mol_type = other RNA
acaggtcctgccatttcaccaggaacatgtatacctggg

SEQ ID NO: 19219 - RNA, 39 nt, synthetic construct
  source 1..39: mol_type = other RNA
acaggtcctgccatttcaccaggaacatgtaaacctggg

SEQ ID NO: 19220 - RNA, 40 nt, synthetic construct
  source 1..40: mol_type = other RNA
gacaggtcctgccatttcaccaggaacatgtagacctggg

SEQ ID NO: 19221 - RNA, 40 nt, synthetic construct
  source 1..40: mol_type = other RNA
gacaggtcctgccatttcaccaggaacatgtacacctggg

SEQ ID NO: 19222 - RNA, 40 nt, synthetic construct
  source 1..40: mol_type = other RNA
gacaggtcctgccatttcaccaggaacatgtaaacctggg

SEQ ID NO: 19223 - RNA, 40 nt, synthetic construct
  source 1..40: mol_type = other RNA
gacaggtcctgccatttcaccaggaacatgtatacctggg

SEQ ID NO: 19224 - RNA, 41 nt, synthetic construct
  source 1..41: mol_type = other RNA
cgacaggtcctgccatttcaccaggaacatgtatacctggg

SEQ ID NO: 19225 - RNA, 41 nt, synthetic construct
  source 1..41: mol_type = other RNA
cgacaggtcctgccatttcaccaggaacatgtagacctggg

SEQ ID NO: 19226 - RNA, 41 nt, synthetic construct
  source 1..41: mol_type = other RNA
cgacaggtcctgccatttcaccaggaacatgtacacctggg

SEQ ID NO: 19227 - RNA, 41 nt, synthetic construct
  source 1..41: mol_type = other RNA
cgacaggtcctgccatttcaccaggaacatgtaaacctggg

SEQ ID NO: 19228 - RNA, 42 nt, synthetic construct
  source 1..42: mol_type = other RNA
ccgacaggtcctgccatttcaccaggaacatgtagacctggg

SEQ ID NO: 19229 - RNA, 42 nt, synthetic construct
  source 1..42: mol_type = other RNA
ccgacaggtcctgccatttcaccaggaacatgtacacctggg

SEQ ID NO: 19230 - RNA, 42 nt, synthetic construct
  source 1..42: mol_type = other RNA
ccgacaggtcctgccatttcaccaggaacatgtaaacctggg

SEQ ID NO: 19231 - RNA, 42 nt, synthetic construct
  source 1..42: mol_type = other RNA
ccgacaggtcctgccatttcaccaggaacatgtatacctggg

SEQ ID NO: 19232 - RNA, 43 nt, synthetic construct
  source 1..43: mol_type = other RNA
tccgacaggtcctgccatttcaccaggaacatgtacacctggg

SEQ ID NO: 19233 - RNA, 43 nt, synthetic construct
  source 1..43: mol_type = other RNA
tccgacaggtcctgccatttcaccaggaacatgtagacctggg

SEQ ID NO: 19234 - RNA, 43 nt, synthetic construct
  source 1..43: mol_type = other RNA
tccgacaggtcctgccatttcaccaggaacatgtaaacctggg

SEQ ID NO: 19235 - RNA, 43 nt, synthetic construct
  source 1..43: mol_type = other RNA
tccgacaggtcctgccatttcaccaggaacatgtatacctggg

SEQ ID NO: 19236 - RNA, 44 nt, synthetic construct
  source 1..44: mol_type = other RNA
ctccgacaggtcctgccatttcaccaggaacatgtatacctggg

SEQ ID NO: 19237 - RNA, 44 nt, synthetic construct
  source 1..44: mol_type = other RNA
ctccgacaggtcctgccatttcaccaggaacatgtaaacctggg

SEQ ID NO: 19238 - RNA, 44 nt, synthetic construct
  source 1..44: mol_type = other RNA
ctccgacaggtcctgccatttcaccaggaacatgtacacctggg

SEQ ID NO: 19239 - RNA, 44 nt, synthetic construct
  source 1..44: mol_type = other RNA
ctccgacaggtcctgccatttcaccaggaacatgtagacctggg

SEQ ID NO: 19240 - RNA, 45 nt, synthetic construct
  source 1..45: mol_type = other RNA
tctccgacaggtcctgccatttcaccaggaacatgtaaacctggg

SEQ ID NO: 19241 - RNA, 45 nt, synthetic construct
  source 1..45: mol_type = other RNA
tctccgacaggtcctgccatttcaccaggaacatgtacacctggg

SEQ ID NO: 19242 - RNA, 45 nt, synthetic construct
  source 1..45: mol_type = other RNA
tctccgacaggtcctgccatttcaccaggaacatgtatacctggg

SEQ ID NO: 19243 - RNA, 45 nt, synthetic construct
  source 1..45: mol_type = other RNA
tctccgacaggtcctgccatttcaccaggaacatgtagacctggg

SEQ ID NO: 19244 - RNA, 46 nt, synthetic construct
  source 1..46: mol_type = other RNA
ttctccgacaggtcctgccatttcaccaggaacatgtaaacctggg

SEQ ID NO: 19245 - RNA, 46 nt, synthetic construct
  source 1..46: mol_type = other RNA
ttctccgacaggtcctgccatttcaccaggaacatgtatacctggg

SEQ ID NO: 19246 - RNA, 46 nt, synthetic construct
  source 1..46: mol_type = other RNA
ttctccgacaggtcctgccatttcaccaggaacatgtagacctggg

SEQ ID NO: 19247 - RNA, 46 nt, synthetic construct
  source 1..46: mol_type = other RNA
ttctccgacaggtcctgccatttcaccaggaacatgtacacctggg

SEQ ID NO: 19248 - RNA, 47 nt, synthetic construct
  source 1..47: mol_type = other RNA
cttctccgacaggtcctgccatttcaccaggaacatgtatacctggg

SEQ ID NO: 19249 - RNA, 47 nt, synthetic construct
  source 1..47: mol_type = other RNA
cttctccgacaggtcctgccatttcaccaggaacatgtaaacctggg

SEQ ID NO: 19250 - RNA, 47 nt, synthetic construct
  source 1..47: mol_type = other RNA
cttctccgacaggtcctgccatttcaccaggaacatgtacacctggg

SEQ ID NO: 19251 - RNA, 47 nt, synthetic construct
  source 1..47: mol_type = other RNA
cttctccgacaggtcctgccatttcaccaggaacatgtagacctggg

SEQ ID NO: 19252 - RNA, 48 nt, synthetic construct
  source 1..48: mol_type = other RNA
ccttctccgacaggtcctgccatttcaccaggaacatgtagacctggg

SEQ ID NO: 19253 - RNA, 48 nt, synthetic construct
  source 1..48: mol_type = other RNA
ccttctccgacaggtcctgccatttcaccaggaacatgtatacctggg

SEQ ID NO: 19254 - RNA, 48 nt, synthetic construct
  source 1..48: mol_type = other RNA
ccttctccgacaggtcctgccatttcaccaggaacatgtacacctggg

SEQ ID NO: 19255 - RNA, 48 nt, synthetic construct
  source 1..48: mol_type = other RNA
ccttctccgacaggtcctgccatttcaccaggaacatgtaaacctggg

SEQ ID NO: 19256 - RNA, 49 nt, synthetic construct
  source 1..49: mol_type = other RNA
accttctccgacaggtcctgccatttcaccaggaacatgtatacctggg

SEQ ID NO: 19257 - RNA, 49 nt, synthetic construct
  source 1..49: mol_type = other RNA
accttctccgacaggtcctgccatttcaccaggaacatgtacacctggg

SEQ ID NO: 19258 - RNA, 49 nt, synthetic construct
  source 1..49: mol_type = other RNA
accttctccgacaggtcctgccatttcaccaggaacatgtagacctggg

SEQ ID NO: 19259 - RNA, 49 nt, synthetic construct
  source 1..49: mol_type = other RNA
accttctccgacaggtcctgccatttcaccaggaacatgtaaacctggg

SEQ ID NO: 19260 - RNA, 50 nt, synthetic construct
  source 1..50: mol_type = other RNA
caccttctccgacaggtcctgccatttcaccaggaacatgtaaacctggg

SEQ ID NO: 19261 - RNA, 50 nt, synthetic construct
  source 1..50: mol_type = other RNA
caccttctccgacaggtcctgccatttcaccaggaacatgtagacctggg

SEQ ID NO: 19262 - RNA, 50 nt, synthetic construct
  source 1..50: mol_type = other RNA
caccttctccgacaggtcctgccatttcaccaggaacatgtatacctggg

SEQ ID NO: 19263 - RNA, 50 nt, synthetic construct
  source 1..50: mol_type = other RNA
caccttctccgacaggtcctgccatttcaccaggaacatgtacacctggg

SEQ ID NO: 19264 - RNA, 51 nt, synthetic construct
  source 1..51: mol_type = other RNA
ccaccttctccgacaggtcctgccatttcaccaggaacatgtaaacctggg

SEQ ID NO: 19265 - RNA, 51 nt, synthetic construct
  source 1..51: mol_type = other RNA
ccaccttctccgacaggtcctgccatttcaccaggaacatgtacacctggg

SEQ ID NO: 19266 - RNA, 51 nt, synthetic construct
  source 1..51: mol_type = other RNA
ccaccttctccgacaggtcctgccatttcaccaggaacatgtatacctggg

SEQ ID NO: 19267 - RNA, 51 nt, synthetic construct
  source 1..51: mol_type = other RNA
ccaccttctccgacaggtcctgccatttcaccaggaacatgtagacctggg

SEQ ID NO: 19268 - RNA, 52 nt, synthetic construct
  source 1..52: mol_type = other RNA
accaccttctccgacaggtcctgccatttcaccaggaacatgtacacctggg

SEQ ID NO: 19269 - RNA, 52 nt, synthetic construct
  source 1..52: mol_type = other RNA
accaccttctccgacaggtcctgccatttcaccaggaacatgtatacctggg

SEQ ID NO: 19270 - RNA, 52 nt, synthetic construct
  source 1..52: mol_type = other RNA
accaccttctccgacaggtcctgccatttcaccaggaacatgtagacctggg

SEQ ID NO: 19271 - RNA, 52 nt, synthetic construct
  source 1..52: mol_type = other RNA
accaccttctccgacaggtcctgccatttcaccaggaacatgtaaacctggg

SEQ ID NO: 19272 - RNA, 53 nt, synthetic construct
  source 1..53: mol_type = other RNA
gaccaccttctccgacaggtcctgccatttcaccaggaacatgtatacctggg

SEQ ID NO: 19273 - RNA, 53 nt, synthetic construct
  source 1..53: mol_type = other RNA
gaccaccttctccgacaggtcctgccatttcaccaggaacatgtaaacctggg

SEQ ID NO: 19274 - RNA, 53 nt, synthetic construct
  source 1..53: mol_type = other RNA
gaccaccttctccgacaggtcctgccatttcaccaggaacatgtagacctggg

SEQ ID NO: 19275 - RNA, 53 nt, synthetic construct
  source 1..53: mol_type = other RNA
gaccaccttctccgacaggtcctgccatttcaccaggaacatgtacacctggg

SEQ ID NO: 19276 - RNA, 54 nt, synthetic construct
  source 1..54: mol_type = other RNA
agaccaccttctccgacaggtcctgccatttcaccaggaacatgtaaacctggg

SEQ ID NO: 19277 - RNA, 54 nt, synthetic construct
  source 1..54: mol_type = other RNA
agaccaccttctccgacaggtcctgccatttcaccaggaacatgtagacctggg

SEQ ID NO: 19278 - RNA, 54 nt, synthetic construct
  source 1..54: mol_type = other RNA
agaccaccttctccgacaggtcctgccatttcaccaggaacatgtatacctggg

SEQ ID NO: 19279 - RNA, 54 nt, synthetic construct
  source 1..54: mol_type = other RNA
agaccaccttctccgacaggtcctgccatttcaccaggaacatgtacacctggg

SEQ ID NO: 19280 - RNA, 55 nt, synthetic construct
  source 1..55: mol_type = other RNA
tagaccaccttctccgacaggtcctgccatttcaccaggaacatgtaaacctggg

SEQ ID NO: 19281 - RNA, 55 nt, synthetic construct
  source 1..55: mol_type = other RNA
tagaccaccttctccgacaggtcctgccatttcaccaggaacatgtatacctggg

SEQ ID NO: 19282 - RNA, 55 nt, synthetic construct
  source 1..55: mol_type = other RNA
tagaccaccttctccgacaggtcctgccatttcaccaggaacatgtagacctggg

SEQ ID NO: 19283 - RNA, 55 nt, synthetic construct
  source 1..55: mol_type = other RNA
tagaccaccttctccgacaggtcctgccatttcaccaggaacatgtacacctggg

SEQ ID NO: 19284 - RNA, 56 nt, synthetic construct
  source 1..56: mol_type = other RNA
gtagaccaccttctccgacaggtcctgccatttcaccaggaacatgtacacctggg

SEQ ID NO: 19285 - RNA, 56 nt, synthetic construct
  source 1..56: mol_type = other RNA
gtagaccaccttctccgacaggtcctgccatttcaccaggaacatgtaaacctggg

SEQ ID NO: 19286 - RNA, 56 nt, synthetic construct
  source 1..56: mol_type = other RNA
gtagaccaccttctccgacaggtcctgccatttcaccaggaacatgtagacctggg

SEQ ID NO: 19287 - RNA, 56 nt, synthetic construct
  source 1..56: mol_type = other RNA
gtagaccaccttctccgacaggtcctgccatttcaccaggaacatgtatacctggg

SEQ ID NO: 19288 - RNA, 57 nt, synthetic construct
  source 1..57: mol_type = other RNA
ggtagaccaccttctccgacaggtcctgccatttcaccaggaacatgtatacctggg

SEQ ID NO: 19289 - RNA, 57 nt, synthetic construct
  source 1..57: mol_type = other RNA
ggtagaccaccttctccgacaggtcctgccatttcaccaggaacatgtacacctggg

SEQ ID NO: 19290 - RNA, 57 nt, synthetic construct
  source 1..57: mol_type = other RNA
ggtagaccaccttctccgacaggtcctgccatttcaccaggaacatgtagacctggg

SEQ ID NO: 19291 - RNA, 57 nt, synthetic construct
  source 1..57: mol_type = other RNA
ggtagaccaccttctccgacaggtcctgccatttcaccaggaacatgtaaacctggg

SEQ ID NO: 19292 - RNA, 58 nt, synthetic construct
  source 1..58: mol_type = other RNA
cggtagaccaccttctccgacaggtcctgccatttcaccaggaacatgtagacctggg

SEQ ID NO: 19293 - RNA, 58 nt, synthetic construct
  source 1..58: mol_type = other RNA
cggtagaccaccttctccgacaggtcctgccatttcaccaggaacatgtacacctggg

SEQ ID NO: 19294 - RNA, 58 nt, synthetic construct
  source 1..58: mol_type = other RNA
cggtagaccaccttctccgacaggtcctgccatttcaccaggaacatgtaaacctggg

SEQ ID NO: 19295 - RNA, 58 nt, synthetic construct
  source 1..58: mol_type = other RNA
cggtagaccaccttctccgacaggtcctgccatttcaccaggaacatgtatacctggg

SEQ ID NO: 19296 - RNA, 59 nt, synthetic construct
  source 1..59: mol_type = other RNA
ccggtagaccaccttctccgacaggtcctgccatttcaccaggaacatgtagacctggg

SEQ ID NO: 19297 - RNA, 59 nt, synthetic construct
  source 1..59: mol_type = other RNA
ccggtagaccaccttctccgacaggtcctgccatttcaccaggaacatgtatacctggg

SEQ ID NO: 19298 - RNA, 59 nt, synthetic construct
  source 1..59: mol_type = other RNA
ccggtagaccaccttctccgacaggtcctgccatttcaccaggaacatgtacacctggg

SEQ ID NO: 19299 - RNA, 59 nt, synthetic construct
  source 1..59: mol_type = other RNA
ccggtagaccaccttctccgacaggtcctgccatttcaccaggaacatgtaaacctggg

SEQ ID NO: 19300 - RNA, 60 nt, synthetic construct
  source 1..60: mol_type = other RNA
gccggtagaccaccttctccgacaggtcctgccatttcaccaggaacatgtagacctggg

SEQ ID NO: 19301 - RNA, 60 nt, synthetic construct
  source 1..60: mol_type = other RNA
gccggtagaccaccttctccgacaggtcctgccatttcaccaggaacatgtaaacctggg

SEQ ID NO: 19302 - RNA, 60 nt, synthetic construct
  source 1..60: mol_type = other RNA
gccggtagaccaccttctccgacaggtcctgccatttcaccaggaacatgtatacctggg

SEQ ID NO: 19303 - RNA, 60 nt, synthetic construct
  source 1..60: mol_type = other RNA
gccggtagaccaccttctccgacaggtcctgccatttcaccaggaacatgtacacctggg

SEQ ID NO: 19304 - RNA, 61 nt, synthetic construct
  source 1..61: mol_type = other RNA
cgccggtagaccaccttctccgacaggtcctgccatttcaccaggaacatgtatacctggg

SEQ ID NO: 19305 - RNA, 61 nt, synthetic construct
  source 1..61: mol_type = other RNA
cgccggtagaccaccttctccgacaggtcctgccatttcaccaggaacatgtacacctggg

SEQ ID NO: 19306 - RNA, 61 nt, synthetic construct
  source 1..61: mol_type = other RNA
cgccggtagaccaccttctccgacaggtcctgccatttcaccaggaacatgtaaacctggg

SEQ ID NO: 19307 - RNA, 61 nt, synthetic construct
  source 1..61: mol_type = other RNA
cgccggtagaccaccttctccgacaggtcctgccatttcaccaggaacatgtagacctggg

SEQ ID NO: 19308 - RNA, 62 nt, synthetic construct
  source 1..62: mol_type = other RNA
gcgccggtagaccaccttctccgacaggtcctgccatttcaccaggaacatgtacacctggg

SEQ ID NO: 19309 - RNA, 62 nt, synthetic construct
  source 1..62: mol_type = other RNA
gcgccggtagaccaccttctccgacaggtcctgccatttcaccaggaacatgtaaacctggg

SEQ ID NO: 19310 - RNA, 62 nt, synthetic construct
  source 1..62: mol_type = other RNA
gcgccggtagaccaccttctccgacaggtcctgccatttcaccaggaacatgtagacctggg

SEQ ID NO: 19311 - RNA, 62 nt, synthetic construct
  source 1..62: mol_type = other RNA
gcgccggtagaccaccttctccgacaggtcctgccatttcaccaggaacatgtatacctggg

SEQ ID NO: 19312 - RNA, 63 nt, synthetic construct
  source 1..63: mol_type = other RNA
agcgccggtagaccaccttctccgacaggtcctgccatttcaccaggaacatgtatacctggg

SEQ ID NO: 19313 - RNA, 63 nt, synthetic construct
  source 1..63: mol_type = other RNA
agcgccggtagaccaccttctccgacaggtcctgccatttcaccaggaacatgtagacctggg

SEQ ID NO: 19314 - RNA, 63 nt, synthetic construct
  source 1..63: mol_type = other RNA
agcgccggtagaccaccttctccgacaggtcctgccatttcaccaggaacatgtacacctggg

SEQ ID NO: 19315 - RNA, 63 nt, synthetic construct
  source 1..63: mol_type = other RNA
agcgccggtagaccaccttctccgacaggtcctgccatttcaccaggaacatgtaaacctggg

SEQ ID NO: 19316 - RNA, 64 nt, synthetic construct
  source 1..64: mol_type = other RNA
aagcgccggtagaccaccttctccgacaggtcctgccatttcaccaggaacatgtatacctggg

SEQ ID NO: 19317 - RNA, 64 nt, synthetic construct
  source 1..64: mol_type = other RNA
aagcgccggtagaccaccttctccgacaggtcctgccatttcaccaggaacatgtagacctggg

SEQ ID NO: 19318 - RNA, 64 nt, synthetic construct
  source 1..64: mol_type = other RNA
aagcgccggtagaccaccttctccgacaggtcctgccatttcaccaggaacatgtacacctggg

SEQ ID NO: 19319 - RNA, 64 nt, synthetic construct
  source 1..64: mol_type = other RNA
aagcgccggtagaccaccttctccgacaggtcctgccatttcaccaggaacatgtaaacctggg

SEQ ID NO: 19320 - RNA, 65 nt, synthetic construct
  source 1..65: mol_type = other RNA
gaagcgccggtagaccaccttctccgacaggtcctgccatttcaccaggaacatgtatacctggg

SEQ ID NO: 19321 - RNA, 65 nt, synthetic construct
  source 1..65: mol_type = other RNA
gaagcgccggtagaccaccttctccgacaggtcctgccatttcaccaggaacatgtacacctggg

SEQ ID NO: 19322 - RNA, 65 nt, synthetic construct
  source 1..65: mol_type = other RNA
gaagcgccggtagaccaccttctccgacaggtcctgccatttcaccaggaacatgtaaacctggg

SEQ ID NO: 19323 - RNA, 65 nt, synthetic construct
  source 1..65: mol_type = other RNA
gaagcgccggtagaccaccttctccgacaggtcctgccatttcaccaggaacatgtagacctggg

SEQ ID NO: 19324 - RNA, 66 nt, synthetic construct
  source 1..66: mol_type = other RNA
tgaagcgccggtagaccaccttctccgacaggtcctgccatttcaccaggaacatgtagacctggg

SEQ ID NO: 19325 - RNA, 66 nt, synthetic construct
  source 1..66: mol_type = other RNA
tgaagcgccggtagaccaccttctccgacaggtcctgccatttcaccaggaacatgtaaacctggg

SEQ ID NO: 19326 - RNA, 66 nt, synthetic construct
  source 1..66: mol_type = other RNA
tgaagcgccggtagaccaccttctccgacaggtcctgccatttcaccaggaacatgtatacctggg

SEQ ID NO: 19327 - RNA, 66 nt, synthetic construct
  source 1..66: mol_type = other RNA
tgaagcgccggtagaccaccttctccgacaggtcctgccatttcaccaggaacatgtacacctggg

SEQ ID NO: 19328 - RNA, 67 nt, synthetic construct
  source 1..67: mol_type = other RNA
gtgaagcgccggtagaccaccttctccgacaggtcctgccatttcaccaggaacatgtacacctggg

SEQ ID NO: 19329 - RNA, 67 nt, synthetic construct
  source 1..67: mol_type = other RNA
gtgaagcgccggtagaccaccttctccgacaggtcctgccatttcaccaggaacatgtagacctggg

SEQ ID NO: 19330 - RNA, 67 nt, synthetic construct
  source 1..67: mol_type = other RNA
gtgaagcgccggtagaccaccttctccgacaggtcctgccatttcaccaggaacatgtaaacctggg

SEQ ID NO: 19331 - RNA, 67 nt, synthetic construct
  source 1..67: mol_type = other RNA
gtgaagcgccggtagaccaccttctccgacaggtcctgccatttcaccaggaacatgtatacctggg

SEQ ID NO: 19332 - RNA, 68 nt, synthetic construct
  source 1..68: mol_type = other RNA
ggtgaagcgccggtagaccaccttctccgacaggtcctgccatttcaccaggaacatgtaaacctggg

SEQ ID NO: 19333 - RNA, 68 nt, synthetic construct
  source 1..68: mol_type = other RNA
ggtgaagcgccggtagaccaccttctccgacaggtcctgccatttcaccaggaacatgtacacctggg

SEQ ID NO: 19334 - RNA, 68 nt, synthetic construct
  source 1..68: mol_type = other RNA
ggtgaagcgccggtagaccaccttctccgacaggtcctgccatttcaccaggaacatgtagacctggg

SEQ ID NO: 19335 - RNA, 68 nt, synthetic construct
  source 1..68: mol_type = other RNA
ggtgaagcgccggtagaccaccttctccgacaggtcctgccatttcaccaggaacatgtatacctggg

SEQ ID NO: 19336 - RNA, 69 nt, synthetic construct
  source 1..69: mol_type = other RNA
cggtgaagcgccggtagaccaccttctccgacaggtcctgccatttcaccaggaacatgtatacctggg

SEQ ID NO: 19337 - RNA, 69 nt, synthetic construct
  source 1..69: mol_type = other RNA
cggtgaagcgccggtagaccaccttctccgacaggtcctgccatttcaccaggaacatgtaaacctggg

SEQ ID NO: 19338 - RNA, 69 nt, synthetic construct
  source 1..69: mol_type = other RNA
cggtgaagcgccggtagaccaccttctccgacaggtcctgccatttcaccaggaacatgtacacctggg

SEQ ID NO: 19339 - RNA, 69 nt, synthetic construct
  source 1..69: mol_type = other RNA
cggtgaagcgccggtagaccaccttctccgacaggtcctgccatttcaccaggaacatgtagacctggg

SEQ ID NO: 19340 - RNA, 70 nt, synthetic construct
  source 1..70: mol_type = other RNA
tcggtgaagcgccggtagaccaccttctccgacaggtcctgccatttcaccaggaacatgtagacctggg

SEQ ID NO: 19341 - RNA, 70 nt, synthetic construct
  source 1..70: mol_type = other RNA
tcggtgaagcgccggtagaccaccttctccgacaggtcctgccatttcaccaggaacatgtatacctggg

SEQ ID NO: 19342 - RNA, 70 nt, synthetic construct
  source 1..70: mol_type = other RNA
tcggtgaagcgccggtagaccaccttctccgacaggtcctgccatttcaccaggaacatgtaaacctggg

SEQ ID NO: 19343 - RNA, 70 nt, synthetic construct
  source 1..70: mol_type = other RNA
tcggtgaagcgccggtagaccaccttctccgacaggtcctgccatttcaccaggaacatgtacacctggg

SEQ ID NO: 19344 - RNA, 71 nt, synthetic construct
  source 1..71: mol_type = other RNA
ctcggtgaagcgccggtagaccaccttctccgacaggtcctgccatttcaccaggaacatgtagacctggg

SEQ ID NO: 19345 - RNA, 71 nt, synthetic construct
  source 1..71: mol_type = other RNA
ctcggtgaagcgccggtagaccaccttctccgacaggtcctgccatttcaccaggaacatgtacacctggg

SEQ ID NO: 19346 - RNA, 71 nt, synthetic construct
  source 1..71: mol_type = other RNA
ctcggtgaagcgccggtagaccaccttctccgacaggtcctgccatttcaccaggaacatgtaaacctggg

SEQ ID NO: 19347 - RNA, 71 nt, synthetic construct
  source 1..71: mol_type = other RNA
ctcggtgaagcgccggtagaccaccttctccgacaggtcctgccatttcaccaggaacatgtatacctggg

SEQ ID NO: 19348 - RNA, 72 nt, synthetic construct
  source 1..72: mol_type = other RNA
tctcggtgaagcgccggtagaccaccttctccgacaggtcctgccatttcaccaggaacatgtatacctggg

SEQ ID NO: 19349 - RNA, 72 nt, synthetic construct
  source 1..72: mol_type = other RNA
tctcggtgaagcgccggtagaccaccttctccgacaggtcctgccatttcaccaggaacatgtacacctggg

SEQ ID NO: 19350 - RNA, 72 nt, synthetic construct
  source 1..72: mol_type = other RNA
tctcggtgaagcgccggtagaccaccttctccgacaggtcctgccatttcaccaggaacatgtaaacctggg

SEQ ID NO: 19351 - RNA, 72 nt, synthetic construct
  source 1..72: mol_type = other RNA
tctcggtgaagcgccggtagaccaccttctccgacaggtcctgccatttcaccaggaacatgtagacctggg

SEQ ID NO: 19352 - RNA, 73 nt, synthetic construct
  source 1..73: mol_type = other RNA
atctcggtgaagcgccggtagaccaccttctccgacaggtcctgccatttcaccaggaacatgtacacctggg

SEQ ID NO: 19353 - RNA, 73 nt, synthetic construct
  source 1..73: mol_type = other RNA
atctcggtgaagcgccggtagaccaccttctccgacaggtcctgccatttcaccaggaacatgtatacctggg

SEQ ID NO: 19354 - RNA, 73 nt, synthetic construct
  source 1..73: mol_type = other RNA
atctcggtgaagcgccggtagaccaccttctccgacaggtcctgccatttcaccaggaacatgtagacctggg

SEQ ID NO: 19355 - RNA, 73 nt, synthetic construct
  source 1..73: mol_type = other RNA
atctcggtgaagcgccggtagaccaccttctccgacaggtcctgccatttcaccaggaacatgtaaacctggg

SEQ ID NO: 19356 - RNA, 74 nt, synthetic construct
  source 1..74: mol_type = other RNA
gatctcggtgaagcgccggtagaccaccttctccgacaggtcctgccatttcaccaggaacatgtagacctggg

SEQ ID NO: 19357 - RNA, 74 nt, synthetic construct
  source 1..74: mol_type = other RNA
gatctcggtgaagcgccggtagaccaccttctccgacaggtcctgccatttcaccaggaacatgtacacctggg

SEQ ID NO: 19358 - RNA, 74 nt, synthetic construct
  source 1..74: mol_type = other RNA
gatctcggtgaagcgccggtagaccaccttctccgacaggtcctgccatttcaccaggaacatgtaaacctggg

SEQ ID NO: 19359 - RNA, 74 nt, synthetic construct
  source 1..74: mol_type = other RNA
gatctcggtgaagcgccggtagaccaccttctccgacaggtcctgccatttcaccaggaacatgtatacctggg

SEQ ID NO: 19360 - RNA, 75 nt, synthetic construct
  source 1..75: mol_type = other RNA
agatctcggtgaagcgccggtagaccaccttctccgacaggtcctgccatttcaccaggaacatgtaaacctggg

SEQ ID NO: 19361 - RNA, 75 nt, synthetic construct
  source 1..75: mol_type = other RNA
agatctcggtgaagcgccggtagaccaccttctccgacaggtcctgccatttcaccaggaacatgtacacctggg

SEQ ID NO: 19362 - RNA, 75 nt, synthetic construct
  source 1..75: mol_type = other RNA
agatctcggtgaagcgccggtagaccaccttctccgacaggtcctgccatttcaccaggaacatgtagacctggg

SEQ ID NO: 19363 - RNA, 75 nt, synthetic construct
  source 1..75: mol_type = other RNA
agatctcggtgaagcgccggtagaccaccttctccgacaggtcctgccatttcaccaggaacatgtatacctggg

SEQ ID NO: 19364 - RNA, 76 nt, synthetic construct
  source 1..76: mol_type = other RNA
tagatctcggtgaagcgccggtagaccaccttctccgacaggtcctgccatttcaccaggaacatgtacacctggg

SEQ ID NO: 19365 - RNA, 76 nt, synthetic construct
  source 1..76: mol_type = other RNA
tagatctcggtgaagcgccggtagaccaccttctccgacaggtcctgccatttcaccaggaacatgtagacctggg

SEQ ID NO: 19366 - RNA, 76 nt, synthetic construct
  source 1..76: mol_type = other RNA
tagatctcggtgaagcgccggtagaccaccttctccgacaggtcctgccatttcaccaggaacatgtaaacctggg

SEQ ID NO: 19367 - RNA, 76 nt, synthetic construct
  source 1..76: mol_type = other RNA
tagatctcggtgaagcgccggtagaccaccttctccgacaggtcctgccatttcaccaggaacatgtatacctggg

SEQ ID NO: 19368 - RNA, 77 nt, synthetic construct
  source 1..77: mol_type = other RNA
gtagatctcggtgaagcgccggtagaccaccttctccgacaggtcctgccatttcaccaggaacatgtacacctggg

SEQ ID NO: 19369 - RNA, 77 nt, synthetic construct
  source 1..77: mol_type = other RNA
gtagatctcggtgaagcgccggtagaccaccttctccgacaggtcctgccatttcaccaggaacatgtaaacctggg

SEQ ID NO: 19370 - RNA, 77 nt, synthetic construct
  source 1..77: mol_type = other RNA
gtagatctcggtgaagcgccggtagaccaccttctccgacaggtcctgccatttcaccaggaacatgtatacctggg

SEQ ID NO: 19371 - RNA, 77 nt, synthetic construct
  source 1..77: mol_type = other RNA
gtagatctcggtgaagcgccggtagaccaccttctccgacaggtcctgccatttcaccaggaacatgtagacctggg

SEQ ID NO: 19372 - RNA, 78 nt, synthetic construct
  source 1..78: mol_type = other RNA
cgtagatctcggtgaagcgccggtagaccaccttctccgacaggtcctgccatttcaccaggaacatgtagacctggg

SEQ ID NO: 19373 - RNA, 78 nt, synthetic construct
  source 1..78: mol_type = other RNA
cgtagatctcggtgaagcgccggtagaccaccttctccgacaggtcctgccatttcaccaggaacatgtacacctggg

SEQ ID NO: 19374 - RNA, 78 nt, synthetic construct
  source 1..78: mol_type = other RNA
cgtagatctcggtgaagcgccggtagaccaccttctccgacaggtcctgccatttcaccaggaacatgtaaacctggg

SEQ ID NO: 19375 - RNA, 78 nt, synthetic construct
  source 1..78: mol_type = other RNA
cgtagatctcggtgaagcgccggtagaccaccttctccgacaggtcctgccatttcaccaggaacatgtatacctggg

SEQ ID NO: 19376 - RNA, 79 nt, synthetic construct
  source 1..79: mol_type = other RNA
tcgtagatctcggtgaagcgccggtagaccaccttctccgacaggtcctgccatttcaccaggaacatgtatacctggg

SEQ ID NO: 19377 - RNA, 79 nt, synthetic construct
  source 1..79: mol_type = other RNA
tcgtagatctcggtgaagcgccggtagaccaccttctccgacaggtcctgccatttcaccaggaacatgtaaacctggg

SEQ ID NO: 19378 - RNA, 79 nt, synthetic construct
  source 1..79: mol_type = other RNA
tcgtagatctcggtgaagcgccggtagaccaccttctccgacaggtcctgccatttcaccaggaacatgtagacctggg

SEQ ID NO: 19379 - RNA, 79 nt, synthetic construct
  source 1..79: mol_type = other RNA
tcgtagatctcggtgaagcgccggtagaccaccttctccgacaggtcctgccatttcaccaggaacatgtacacctggg

SEQ ID NO: 19380 - RNA, 80 nt, synthetic construct
  source 1..80: mol_type = other RNA
ctcgtagatctcggtgaagcgccggtagaccaccttctccgacaggtcctgccatttcaccaggaacatgtaaacctggg

SEQ ID NO: 19381 - RNA, 80 nt, synthetic construct
  source 1..80: mol_type = other RNA
ctcgtagatctcggtgaagcgccggtagaccaccttctccgacaggtcctgccatttcaccaggaacatgtagacctggg

SEQ ID NO: 19382 - RNA, 80 nt, synthetic construct
  source 1..80: mol_type = other RNA
ctcgtagatctcggtgaagcgccggtagaccaccttctccgacaggtcctgccatttcaccaggaacatgtatacctggg

SEQ ID NO: 19383 - RNA, 80 nt, synthetic construct
  source 1..80: mol_type = other RNA
ctcgtagatctcggtgaagcgccggtagaccaccttctccgacaggtcctgccatttcaccaggaacatgtacacctggg

SEQ ID NO: 19384 - RNA, 81 nt, synthetic construct
  source 1..81: mol_type = other RNA
actcgtagatctcggtgaagcgccggtagaccaccttctccgacaggtcctgccatttcaccaggaacatgtaaacctggg

SEQ ID NO: 19385 - RNA, 81 nt, synthetic construct
  source 1..81: mol_type = other RNA
actcgtagatctcggtgaagcgccggtagaccaccttctccgacaggtcctgccatttcaccaggaacatgtacacctggg

SEQ ID NO: 19386 - RNA, 81 nt, synthetic construct
  source 1..81: mol_type = other RNA
actcgtagatctcggtgaagcgccggtagaccaccttctccgacaggtcctgccatttcaccaggaacatgtagacctggg

SEQ ID NO: 19387 - RNA, 81 nt, synthetic construct
  source 1..81: mol_type = other RNA
actcgtagatctcggtgaagcgccggtagaccaccttctccgacaggtcctgccatttcaccaggaacatgtatacctggg

SEQ ID NO: 19388 - RNA, 82 nt, synthetic construct
  source 1..82: mol_type = other RNA
aactcgtagatctcggtgaagcgccggtagaccaccttctccgacaggtcctgccatttcaccaggaacatgtatacctggg

SEQ ID NO: 19389 - RNA, 82 nt, synthetic construct
  source 1..82: mol_type = other RNA
aactcgtagatctcggtgaagcgccggtagaccaccttctccgacaggtcctgccatttcaccaggaacatgtagacctggg

SEQ ID NO: 19390 - RNA, 82 nt, synthetic construct
  source 1..82: mol_type = other RNA
aactcgtagatctcggtgaagcgccggtagaccaccttctccgacaggtcctgccatttcaccaggaacatgtacacctggg

SEQ ID NO: 19391 - RNA, 82 nt, synthetic construct
  source 1..82: mol_type = other RNA
aactcgtagatctcggtgaagcgccggtagaccaccttctccgacaggtcctgccatttcaccaggaacatgtaaacctggg

SEQ ID NO: 19392 - RNA, 83 nt, synthetic construct
  source 1..83: mol_type = other RNA
gaactcgtagatctcggtgaagcgccggtagaccaccttctccgacaggtcctgccatttcaccaggaacatgtacacctggg

SEQ ID NO: 19393 - RNA, 83 nt, synthetic construct
  source 1..83: mol_type = other RNA
gaactcgtagatctcggtgaagcgccggtagaccaccttctccgacaggtcctgccatttcaccaggaacatgtagacctggg

SEQ ID NO: 19394 - RNA, 83 nt, synthetic construct
  source 1..83: mol_type = other RNA
gaactcgtagatctcggtgaagcgccggtagaccaccttctccgacaggtcctgccatttcaccaggaacatgtaaacctggg

SEQ ID NO: 19395 - RNA, 83 nt, synthetic construct
  source 1..83: mol_type = other RNA
gaactcgtagatctcggtgaagcgccggtagaccaccttctccgacaggtcctgccatttcaccaggaacatgtatacctggg

SEQ ID NO: 19396 - RNA, 84 nt, synthetic construct
  source 1..84: mol_type = other RNA
ggaactcgtagatctcggtgaagcgccggtagaccaccttctccgacaggtcctgccatttcaccaggaacatgtagacctggg

SEQ ID NO: 19397 - RNA, 84 nt, synthetic construct
  source 1..84: mol_type = other RNA
ggaactcgtagatctcggtgaagcgccggtagaccaccttctccgacaggtcctgccatttcaccaggaacatgtaaacctggg

SEQ ID NO: 19398 - RNA, 84 nt, synthetic construct
  source 1..84: mol_type = other RNA
ggaactcgtagatctcggtgaagcgccggtagaccaccttctccgacaggtcctgccatttcaccaggaacatgtatacctggg

SEQ ID NO: 19399 - RNA, 84 nt, synthetic construct
  source 1..84: mol_type = other RNA
ggaactcgtagatctcggtgaagcgccggtagaccaccttctccgacaggtcctgccatttcaccaggaacatgtacacctggg

SEQ ID NO: 19400 - RNA, 85 nt, synthetic construct
  source 1..85: mol_type = other RNA
tggaactcgtagatctcggtgaagcgccggtagaccaccttctccgacaggtcctgccatttcaccaggaacatgtaaacctggg

SEQ ID NO: 19401 - RNA, 85 nt, synthetic construct
  source 1..85: mol_type = other RNA
tggaactcgtagatctcggtgaagcgccggtagaccaccttctccgacaggtcctgccatttcaccaggaacatgtatacctggg

SEQ ID NO: 19402 - RNA, 85 nt, synthetic construct
  source 1..85: mol_type = other RNA
tggaactcgtagatctcggtgaagcgccggtagaccaccttctccgacaggtcctgccatttcaccaggaacatgtagacctggg

SEQ ID NO: 19403 - RNA, 85 nt, synthetic construct
  source 1..85: mol_type = other RNA
tggaactcgtagatctcggtgaagcgccggtagaccaccttctccgacaggtcctgccatttcaccaggaacatgtacacctggg

SEQ ID NO: 19404 - RNA, 86 nt, synthetic construct
  source 1..86: mol_type = other RNA
atggaactcgtagatctcggtgaagcgccggtagaccaccttctccgacaggtcctgccatttcaccaggaacatgtagacctggg

SEQ ID NO: 19405 - RNA, 86 nt, synthetic construct
  source 1..86: mol_type = other RNA
atggaactcgtagatctcggtgaagcgccggtagaccaccttctccgacaggtcctgccatttcaccaggaacatgtacacctggg

SEQ ID NO: 19406 - RNA, 86 nt, synthetic construct
  source 1..86: mol_type = other RNA
atggaactcgtagatctcggtgaagcgccggtagaccaccttctccgacaggtcctgccatttcaccaggaacatgtaaacctggg

SEQ ID NO: 19407 - RNA, 86 nt, synthetic construct
  source 1..86: mol_type = other RNA
atggaactcgtagatctcggtgaagcgccggtagaccaccttctccgacaggtcctgccatttcaccaggaacatgtatacctggg

SEQ ID NO: 19408 - RNA, 87 nt, synthetic construct
  source 1..87: mol_type = other RNA
catggaactcgtagatctcggtgaagcgccggtagaccaccttctccgacaggtcctgccatttcaccaggaacatgtacacctggg

SEQ ID NO: 19409 - RNA, 87 nt, synthetic construct
  source 1..87: mol_type = other RNA
catggaactcgtagatctcggtgaagcgccggtagaccaccttctccgacaggtcctgccatttcaccaggaacatgtatacctggg

SEQ ID NO: 19410 - RNA, 87 nt, synthetic construct
  source 1..87: mol_type = other RNA
catggaactcgtagatctcggtgaagcgccggtagaccaccttctccgacaggtcctgccatttcaccaggaacatgtagacctggg

SEQ ID NO: 19411 - RNA, 87 nt, synthetic construct
  source 1..87: mol_type = other RNA
catggaactcgtagatctcggtgaagcgccggtagaccaccttctccgacaggtcctgccatttcaccaggaacatgtaaacctggg

SEQ ID NO: 19412 - RNA, 88 nt, synthetic construct
  source 1..88: mol_type = other RNA
acatggaactcgtagatctcggtgaagcgccggtagaccaccttctccgacaggtcctgccatttcaccaggaacatgtaaacctggg

SEQ ID NO: 19413 - RNA, 88 nt, synthetic construct
  source 1..88: mol_type = other RNA
acatggaactcgtagatctcggtgaagcgccggtagaccaccttctccgacaggtcctgccatttcaccaggaacatgtagacctggg

SEQ ID NO: 19414 - RNA, 88 nt, synthetic construct
  source 1..88: mol_type = other RNA
acatggaactcgtagatctcggtgaagcgccggtagaccaccttctccgacaggtcctgccatttcaccaggaacatgtatacctggg

SEQ ID NO: 19415 - RNA, 88 nt, synthetic construct
  source 1..88: mol_type = other RNA
acatggaactcgtagatctcggtgaagcgccggtagaccaccttctccgacaggtcctgccatttcaccaggaacatgtacacctggg

SEQ ID NO: 19416 - RNA, 89 nt, synthetic construct
  source 1..89: mol_type = other RNA
cacatggaactcgtagatctcggtgaagcgccggtagaccaccttctccgacaggtcctgccatttcaccaggaacatgtagacctggg

SEQ ID NO: 19417 - RNA, 89 nt, synthetic construct
  source 1..89: mol_type = other RNA
cacatggaactcgtagatctcggtgaagcgccggtagaccaccttctccgacaggtcctgccatttcaccaggaacatgtacacctggg

SEQ ID NO: 19418 - RNA, 89 nt, synthetic construct
  source 1..89: mol_type = other RNA
cacatggaactcgtagatctcggtgaagcgccggtagaccaccttctccgacaggtcctgccatttcaccaggaacatgtatacctggg

SEQ ID NO: 19419 - RNA, 89 nt, synthetic construct
  source 1..89: mol_type = other RNA
cacatggaactcgtagatctcggtgaagcgccggtagaccaccttctccgacaggtcctgccatttcaccaggaacatgtaaacctggg

SEQ ID NO: 19420 - RNA, 90 nt, synthetic construct
  source 1..90: mol_type = other RNA
tcacatggaactcgtagatctcggtgaagcgccggtagaccaccttctccgacaggtcctgccatttcaccaggaacatgtacacctggg

SEQ ID NO: 19421 - RNA, 90 nt, synthetic construct
  source 1..90: mol_type = other RNA
tcacatggaactcgtagatctcggtgaagcgccggtagaccaccttctccgacaggtcctgccatttcaccaggaacatgtagacctggg

SEQ ID NO: 19422 - RNA, 90 nt, synthetic construct
  source 1..90: mol_type = other RNA
tcacatggaactcgtagatctcggtgaagcgccggtagaccaccttctccgacaggtcctgccatttcaccaggaacatgtaaacctggg

SEQ ID NO: 19423 - RNA, 90 nt, synthetic construct
  source 1..90: mol_type = other RNA
tcacatggaactcgtagatctcggtgaagcgccggtagaccaccttctccgacaggtcctgccatttcaccaggaacatgtatacctggg

SEQ ID NO: 19424 - RNA, 91 nt, synthetic construct
  source 1..91: mol_type = other RNA
ctcacatggaactcgtagatctcggtgaagcgccggtagaccaccttctccgacaggtcctgccatttcaccaggaacatgtagacctggg

SEQ ID NO: 19425 - RNA, 91 nt, synthetic construct
  source 1..91: mol_type = other RNA
ctcacatggaactcgtagatctcggtgaagcgccggtagaccaccttctccgacaggtcctgccatttcaccaggaacatgtatacctggg

SEQ ID NO: 19426 - RNA, 91 nt, synthetic construct
  source 1..91: mol_type = other RNA
ctcacatggaactcgtagatctcggtgaagcgccggtagaccaccttctccgacaggtcctgccatttcaccaggaacatgtacacctggg

SEQ ID NO: 19427 - RNA, 91 nt, synthetic construct
  source 1..91: mol_type = other RNA
ctcacatggaactcgtagatctcggtgaagcgccggtagaccaccttctccgacaggtcctgccatttcaccaggaacatgtaaacctggg

SEQ ID NO: 19428 - RNA, 92 nt, synthetic construct
  source 1..92: mol_type = other RNA
actcacatggaactcgtagatctcggtgaagcgccggtagaccaccttctccgacaggtcctgccatttcaccaggaacatgtaaacctggg

SEQ ID NO: 19429 - RNA, 92 nt, synthetic construct
  source 1..92: mol_type = other RNA
actcacatggaactcgtagatctcggtgaagcgccggtagaccaccttctccgacaggtcctgccatttcaccaggaacatgtacacctggg

SEQ ID NO: 19430 - RNA, 92 nt, synthetic construct
  source 1..92: mol_type = other RNA
actcacatggaactcgtagatctcggtgaagcgccggtagaccaccttctccgacaggtcctgccatttcaccaggaacatgtagacctggg

SEQ ID NO: 19431 - RNA, 92 nt, synthetic construct
  source 1..92: mol_type = other RNA
actcacatggaactcgtagatctcggtgaagcgccggtagaccaccttctccgacaggtcctgccatttcaccaggaacatgtatacctggg

SEQ ID NO: 19432 - RNA, 93 nt, synthetic construct
  source 1..93: mol_type = other RNA
cactcacatggaactcgtagatctcggtgaagcgccggtagaccaccttctccgacaggtcctgccatttcaccaggaacatgtaaacctggg

SEQ ID NO: 19433 - RNA, 93 nt, synthetic construct
  source 1..93: mol_type = other RNA
cactcacatggaactcgtagatctcggtgaagcgccggtagaccaccttctccgacaggtcctgccatttcaccaggaacatgtacacctggg

SEQ ID NO: 19434 - RNA, 93 nt, synthetic construct
  source 1..93: mol_type = other RNA
cactcacatggaactcgtagatctcggtgaagcgccggtagaccaccttctccgacaggtcctgccatttcaccaggaacatgtagacctggg

SEQ ID NO: 19435 - RNA, 93 nt, synthetic construct
  source 1..93: mol_type = other RNA
cactcacatggaactcgtagatctcggtgaagcgccggtagaccaccttctccgacaggtcctgccatttcaccaggaacatgtatacctggg

SEQ ID NO: 19436 - RNA, 94 nt, synthetic construct
  source 1..94: mol_type = other RNA
acactcacatggaactcgtagatctcggtgaagcgccggtagaccaccttctccgacaggtcctgccatttcaccaggaacatgtatacctggg

SEQ ID NO: 19437 - RNA, 94 nt, synthetic construct
  source 1..94: mol_type = other RNA
acactcacatggaactcgtagatctcggtgaagcgccggtagaccaccttctccgacaggtcctgccatttcaccaggaacatgtagacctggg

SEQ ID NO: 19438 - RNA, 94 nt, synthetic construct
  source 1..94: mol_type = other RNA
acactcacatggaactcgtagatctcggtgaagcgccggtagaccaccttctccgacaggtcctgccatttcaccaggaacatgtacacctggg

SEQ ID NO: 19439 - RNA, 94 nt, synthetic construct
  source 1..94: mol_type = other RNA
acactcacatggaactcgtagatctcggtgaagcgccggtagaccaccttctccgacaggtcctgccatttcaccaggaacatgtaaacctggg

SEQ ID NO: 19440 - RNA, 95 nt, synthetic construct
  source 1..95: mol_type = other RNA
cacactcacatggaactcgtagatctcggtgaagcgccggtagaccaccttctccgacaggtcctgccatttcaccaggaacatgtaaacctggg

SEQ ID NO: 19441 - RNA, 95 nt, synthetic construct
  source 1..95: mol_type = other RNA
cacactcacatggaactcgtagatctcggtgaagcgccggtagaccaccttctccgacaggtcctgccatttcaccaggaacatgtacacctggg

SEQ ID NO: 19442 - RNA, 95 nt, synthetic construct
  source 1..95: mol_type = other RNA
cacactcacatggaactcgtagatctcggtgaagcgccggtagaccaccttctccgacaggtcctgccatttcaccaggaacatgtagacctggg

SEQ ID NO: 19443 - RNA, 95 nt, synthetic construct
  source 1..95: mol_type = other RNA
cacactcacatggaactcgtagatctcggtgaagcgccggtagaccaccttctccgacaggtcctgccatttcaccaggaacatgtatacctggg

SEQ ID NO: 19444 - RNA, 96 nt, synthetic construct
  source 1..96: mol_type = other RNA
ccacactcacatggaactcgtagatctcggtgaagcgccggtagaccaccttctccgacaggtcctgccatttcaccaggaacatgtatacctggg

SEQ ID NO: 19445 - RNA, 96 nt, synthetic construct
  source 1..96: mol_type = other RNA
ccacactcacatggaactcgtagatctcggtgaagcgccggtagaccaccttctccgacaggtcctgccatttcaccaggaacatgtagacctggg

SEQ ID NO: 19446 - RNA, 96 nt, synthetic construct
  source 1..96: mol_type = other RNA
ccacactcacatggaactcgtagatctcggtgaagcgccggtagaccaccttctccgacaggtcctgccatttcaccaggaacatgtacacctggg

SEQ ID NO: 19447 - RNA, 96 nt, synthetic construct
  source 1..96: mol_type = other RNA
ccacactcacatggaactcgtagatctcggtgaagcgccggtagaccaccttctccgacaggtcctgccatttcaccaggaacatgtaaacctggg

SEQ ID NO: 19448 - RNA, 97 nt, synthetic construct
  source 1..97: mol_type = other RNA
cccacactcacatggaactcgtagatctcggtgaagcgccggtagaccaccttctccgacaggtcctgccatttcaccaggaacatgtagacctggg

SEQ ID NO: 19449 - RNA, 97 nt, synthetic construct
  source 1..97: mol_type = other RNA
cccacactcacatggaactcgtagatctcggtgaagcgccggtagaccaccttctccgacaggtcctgccatttcaccaggaacatgtatacctggg

SEQ ID NO: 19450 - RNA, 97 nt, synthetic construct
  source 1..97: mol_type = other RNA
cccacactcacatggaactcgtagatctcggtgaagcgccggtagaccaccttctccgacaggtcctgccatttcaccaggaacatgtaaacctggg

SEQ ID NO: 19451 - RNA, 97 nt, synthetic construct
  source 1..97: mol_type = other RNA
cccacactcacatggaactcgtagatctcggtgaagcgccggtagaccaccttctccgacaggtcctgccatttcaccaggaacatgtacacctggg

SEQ ID NO: 19452 - RNA, 98 nt, synthetic construct
  source 1..98: mol_type = other RNA
ccccacactcacatggaactcgtagatctcggtgaagcgccggtagaccaccttctccgacaggtcctgccatttcaccaggaacatgtatacctggg

SEQ ID NO: 19453 - RNA, 98 nt, synthetic construct
  source 1..98: mol_type = other RNA
ccccacactcacatggaactcgtagatctcggtgaagcgccggtagaccaccttctccgacaggtcctgccatttcaccaggaacatgtacacctggg

SEQ ID NO: 19454 - RNA, 98 nt, synthetic construct
  source 1..98: mol_type = other RNA
ccccacactcacatggaactcgtagatctcggtgaagcgccggtagaccaccttctccgacaggtcctgccatttcaccaggaacatgtaaacctggg

SEQ ID NO: 19455 - RNA, 98 nt, synthetic construct
  source 1..98: mol_type = other RNA
ccccacactcacatggaactcgtagatctcggtgaagcgccggtagaccaccttctccgacaggtcctgccatttcaccaggaacatgtagacctggg

SEQ ID NO: 19456 - RNA, 99 nt, synthetic construct
  source 1..99: mol_type = other RNA
tccccacactcacatggaactcgtagatctcggtgaagcgccggtagaccaccttctccgacaggtcctgccatttcaccaggaacatgtacacctggg

SEQ ID NO: 19457 - RNA, 99 nt, synthetic construct
  source 1..99: mol_type = other RNA
tccccacactcacatggaactcgtagatctcggtgaagcgccggtagaccaccttctccgacaggtcctgccatttcaccaggaacatgtagacctggg

SEQ ID NO: 19458 - RNA, 99 nt, synthetic construct
  source 1..99: mol_type = other RNA
tccccacactcacatggaactcgtagatctcggtgaagcgccggtagaccaccttctccgacaggtcctgccatttcaccaggaacatgtatacctggg

SEQ ID NO: 19459 - RNA, 99 nt, synthetic construct
  source 1..99: mol_type = other RNA
tccccacactcacatggaactcgtagatctcggtgaagcgccggtagaccaccttctccgacaggtcctgccatttcaccaggaacatgtaaacctggg

SEQ ID NO: 19460 - RNA, 100 nt, synthetic construct
  source 1..100: mol_type = other RNA
atccccacactcacatggaactcgtagatctcggtgaagcgccggtagaccaccttctccgacaggtcctgccatttcaccaggaacatgtaaacctggg

SEQ ID NO: 19461 - RNA, 100 nt, synthetic construct
  source 1..100: mol_type = other RNA
atccccacactcacatggaactcgtagatctcggtgaagcgccggtagaccaccttctccgacaggtcctgccatttcaccaggaacatgtacacctggg

SEQ ID NO: 19462 - RNA, 100 nt, synthetic construct
  source 1..100: mol_type = other RNA
atccccacactcacatggaactcgtagatctcggtgaagcgccggtagaccaccttctccgacaggtcctgccatttcaccaggaacatgtatacctggg

SEQ ID NO: 19463 - RNA, 100 nt, synthetic construct
  source 1..100: mol_type = other RNA
atccccacactcacatggaactcgtagatctcggtgaagcgccggtagaccaccttctccgacaggtcctgccatttcaccaggaacatgtagacctggg

SEQ ID NO: 19464 - RNA, 101 nt, synthetic construct
  source 1..101: mol_type = other RNA
catccccacactcacatggaactcgtagatctcggtgaagcgccggtagaccaccttctccgacaggtcctgccatttcaccaggaacatgtatacctggg

SEQ ID NO: 19465 - RNA, 101 nt, synthetic construct
  source 1..101: mol_type = other RNA
catccccacactcacatggaactcgtagatctcggtgaagcgccggtagaccaccttctccgacaggtcctgccatttcaccaggaacatgtaaacctggg

SEQ ID NO: 19466 - RNA, 101 nt, synthetic construct
  source 1..101: mol_type = other RNA
catccccacactcacatggaactcgtagatctcggtgaagcgccggtagaccaccttctccgacaggtcctgccatttcaccaggaacatgtacacctggg

SEQ ID NO: 19467 - RNA, 101 nt, synthetic construct
  source 1..101: mol_type = other RNA
catccccacactcacatggaactcgtagatctcggtgaagcgccggtagaccaccttctccgacaggtcctgccatttcaccaggaacatgtagacctggg

SEQ ID NO: 19468 - RNA, 102 nt, synthetic construct
  source 1..102: mol_type = other RNA
ccatccccacactcacatggaactcgtagatctcggtgaagcgccggtagaccaccttctccgacaggtcctgccatttcaccaggaacatgtaaacctggg

SEQ ID NO: 19469 - RNA, 102 nt, synthetic construct
  source 1..102: mol_type = other RNA
ccatccccacactcacatggaactcgtagatctcggtgaagcgccggtagaccaccttctccgacaggtcctgccatttcaccaggaacatgtatacctggg

SEQ ID NO: 19470 - RNA, 102 nt, synthetic construct
  source 1..102: mol_type = other RNA
ccatccccacactcacatggaactcgtagatctcggtgaagcgccggtagaccaccttctccgacaggtcctgccatttcaccaggaacatgtagacctggg

SEQ ID NO: 19471 - RNA, 102 nt, synthetic construct
  source 1..102: mol_type = other RNA
ccatccccacactcacatggaactcgtagatctcggtgaagcgccggtagaccaccttctccgacaggtcctgccatttcaccaggaacatgtacacctggg

SEQ ID NO: 19472 - RNA, 103 nt, synthetic construct
  source 1..103: mol_type = other RNA
tccatccccacactcacatggaactcgtagatctcggtgaagcgccggtagaccaccttctccgacaggtcctgccatttcaccaggaacatgtaaacctggg

SEQ ID NO: 19473 - RNA, 103 nt, synthetic construct
  source 1..103: mol_type = other RNA
tccatccccacactcacatggaactcgtagatctcggtgaagcgccggtagaccaccttctccgacaggtcctgccatttcaccaggaacatgtacacctggg

SEQ ID NO: 19474 - RNA, 103 nt, synthetic construct
  source 1..103: mol_type = other RNA
tccatccccacactcacatggaactcgtagatctcggtgaagcgccggtagaccaccttctccgacaggtcctgccatttcaccaggaacatgtagacctggg

SEQ ID NO: 19475 - RNA, 103 nt, synthetic construct
  source 1..103: mol_type = other RNA
tccatccccacactcacatggaactcgtagatctcggtgaagcgccggtagaccaccttctccgacaggtcctgccatttcaccaggaacatgtatacctggg

SEQ ID NO: 19476 - RNA, 15 nt, synthetic construct
  source 1..15: mol_type = other RNA
atccccacactcaca

SEQ ID NO: 19477 - RNA, 20 nt, synthetic construct
  source 1..20: mol_type = other RNA
ccccacactcacatggaact

SEQ ID NO: 19478 - RNA, 20 nt, synthetic construct
  source 1..20: mol_type = other RNA
cctccatccccacactcaca

SEQ ID NO: 19479 - RNA, 20 nt, synthetic construct
  source 1..20: mol_type = other RNA
ctccatccccacactcacat

SEQ ID NO: 19480 - RNA, 20 nt, synthetic construct
  source 1..20: mol_type = other RNA
cacactcacatggaactcgt

SEQ ID NO: 19481 - RNA, 115 nt, synthetic construct
  source 1..115: mol_type = other RNA
cccgactctggctttcccccgttttagagctagaaatagcaagttaaaataaggctagtccgttatcaacttgaaaaagtggcaccgagtcggtgcgtacacctgggggaaagcc

SEQ ID NO: 19482 - RNA, 116 nt, synthetic construct
  source 1..116: mol_type = other RNA
gcccgactctggctttcccccgttttagagctagaaatagcaagttaaaataaggctagtccgttatcaacttgaaaaagtggcaccgagtcggtgcgtacacctgggggaaagcc

SEQ ID NO: 19483 - RNA, 117 nt, synthetic construct
  source 1..117: mol_type = other RNA
cccgactctggctttcccccgttttagagctagaaatagcaagttaaaataaggctagtccgttatcaacttgaaaaagtggcaccgagtcggtgcgtacacctgggggaaagccag

SEQ ID NO: 19484 - RNA, 117 nt, synthetic construct
  source 1..117: mol_type = other RNA
cccgactctggctttcccccgttttagagctagaaatagcaagttaaaataaggctagtccgttatcaacttgaaaaagtggcaccgagtcggtgcatgtacacctgggggaaagcc

SEQ ID NO: 19485 - RNA, 118 nt, synthetic construct
  source 1..118: mol_type = other RNA
gcccgactctggctttcccccgttttagagctagaaatagcaagttaaaataaggctagtccgttatcaacttgaaaaagtggcaccgagtcggtgcgtacacctgggggaaagccag

SEQ ID NO: 19486 - RNA, 118 nt, synthetic construct
  source 1..118: mol_type = other RNA
gcccgactctggctttcccccgttttagagctagaaatagcaagttaaaataaggctagtccgttatcaacttgaaaaagtggcaccgagtcggtgcatgtacacctgggggaaagcc

SEQ ID NO: 19487 - RNA, 119 nt, synthetic construct
  source 1..119: mol_type = other RNA
cccgactctggctttcccccgttttagagctagaaatagcaagttaaaataaggctagtccgttatcaacttgaaaaagtggcaccgagtcggtgcacatgtacacctgggggaaagcc

SEQ ID NO: 19488 - RNA, 119 nt, synthetic construct
  source 1..119: mol_type = other RNA
cccgactctggctttcccccgttttagagctagaaatagcaagttaaaataaggctagtccgttatcaacttgaaaaagtggcaccgagtcggtgcatgtacacctgggggaaagccag

SEQ ID NO: 19489 - RNA, 119 nt, synthetic construct
  source 1..119: mol_type = other RNA
cccgactctggctttcccccgttttagagctagaaatagcaagttaaaataaggctagtccgttatcaacttgaaaaagtggcaccgagtcggtgcgtacacctgggggaaagccagag

SEQ ID NO: 19490 - RNA, 119 nt, synthetic construct
  source 1..119: mol_type = other RNA
cccgactctggctttcccccgttttagagctagaaatagcaagttaaaataaggctagtccgttatcaacttgaaaaagtggcaccgagtcggtgcgtacacctgggggaaagcctttt

SEQ ID NO: 19491 - RNA, 120 nt, synthetic construct
  source 1..120: mol_type = other RNA
gcccgactctggctttcccccgttttagagctagaaatagcaagttaaaataaggctagtccgttatcaacttgaaaaagtggcaccgagtcggtgcatgtacacctgggggaaagccag

SEQ ID NO: 19492 - RNA, 120 nt, synthetic construct
  source 1..120: mol_type = other RNA
gcccgactctggctttcccccgttttagagctagaaatagcaagttaaaataaggctagtccgttatcaacttgaaaaagtggcaccgagtcggtgcacatgtacacctgggggaaagcc

SEQ ID NO: 19493 - RNA, 120 nt, synthetic construct
  source 1..120: mol_type = other RNA
gcccgactctggctttcccccgttttagagctagaaatagcaagttaaaataaggctagtccgttatcaacttgaaaaagtggcaccgagtcggtgcgtacacctgggggaaagccagag

SEQ ID NO: 19494 - RNA, 121 nt, synthetic construct
  source 1..121: mol_type = other RNA
cccgactctggctttcccccgttttagagctagaaatagcaagttaaaataaggctagtccgttatcaacttgaaaaagtggcaccgagtcggtgcatgtacacctgggggaaagcctttt

SEQ ID NO: 19495 - RNA, 121 nt, synthetic construct
  source 1..121: mol_type = other RNA
cccgactctggctttcccccgttttagagctagaaatagcaagttaaaataaggctagtccgttatcaacttgaaaaagtggcaccgagtcggtgcgtacacctgggggaaagccagagtc

SEQ ID NO: 19496 - RNA, 121 nt, synthetic construct
  source 1..121: mol_type = other RNA
cccgactctggctttcccccgttttagagctagaaatagcaagttaaaataaggctagtccgttatcaacttgaaaaagtggcaccgagtcggtgcgaacatgtacacctgggggaaagcc

SEQ ID NO: 19497 - RNA, 121 nt, synthetic construct
  source 1..121: mol_type = other RNA
cccgactctggctttcccccgttttagagctagaaatagcaagttaaaataaggctagtccgttatcaacttgaaaaagtggcaccgagtcggtgcatgtacacctgggggaaagccagag

SEQ ID NO: 19498 - RNA, 121 nt, synthetic construct
  source 1..121: mol_type = other RNA
cccgactctggctttcccccgttttagagctagaaatagcaagttaaaataaggctagtccgttatcaacttgaaaaagtggcaccgagtcggtgcacatgtacacctgggggaaagccag

SEQ ID NO: 19499 - RNA, 121 nt, synthetic construct
  source 1..121: mol_type = other RNA
cccgactctggctttcccccgttttagagctagaaatagcaagttaaaataaggctagtccgttatcaacttgaaaaagtggcaccgagtcggtgcacatgtaaacctgggggaaagccag

SEQ ID NO: 19500 - RNA, 121 nt, synthetic construct
  source 1..121: mol_type = other RNA
cccgactctggctttcccccgttttagagctagaaatagcaagttaaaataaggctagtccgttatcaacttgaaaaagtggcaccgagtcggtgcgtacacctgggggaaagccagtttt

SEQ ID NO: 19501 - RNA, 121 nt, synthetic construct
  source 1..121: mol_type = other RNA
cccgactctggctttcccccgttttagagctagaaatagcaagttaaaataaggctagtccgttatcaacttgaaaaagtggcaccgagtcggtgcacatgtatacctgggggaaagccag

SEQ ID NO: 19502 - RNA, 121 nt, synthetic construct
  source 1..121: mol_type = other RNA
cccgactctggctttcccccgttttagagctagaaatagcaagttaaaataaggctagtccgttatcaacttgaaaaagtggcaccgagtcggtgcacatgtagacctgggggaaagccag

SEQ ID NO: 19503 - RNA, 122 nt, synthetic construct
  source 1..122: mol_type = other RNA
cccgactctggctttcccccgttttagagctagaaatagcaagttaaaataaggctagtccgttatcaacttgaaaaagtggcaccgagtcggtgcaacatgtaaacctgggggaaagccag

SEQ ID NO: 19504 - RNA, 122 nt, synthetic construct
  source 1..122: mol_type = other RNA
gcccgactctggctttcccccgttttagagctagaaatagcaagttaaaataaggctagtccgttatcaacttgaaaaagtggcaccgagtcggtgcgaacatgtacacctgggggaaagcc

SEQ ID NO: 19505 - RNA, 122 nt, synthetic construct
  source 1..122: mol_type = other RNA
gcccgactctggctttcccccgttttagagctagaaatagcaagttaaaataaggctagtccgttatcaacttgaaaaagtggcaccgagtcggtgcgtacacctgggggaaagccagagtc

SEQ ID NO: 19506 - RNA, 122 nt, synthetic construct
  source 1..122: mol_type = other RNA
gcccgactctggctttcccccgttttagagctagaaatagcaagttaaaataaggctagtccgttatcaacttgaaaaagtggcaccgagtcggtgcacatgtacacctgggggaaagccag

SEQ ID NO: 19507 - RNA, 122 nt, synthetic construct
  source 1..122: mol_type = other RNA
cccgactctggctttcccccgttttagagctagaaatagcaagttaaaataaggctagtccgttatcaacttgaaaaagtggcaccgagtcggtgcaacatgtatacctgggggaaagccag

SEQ ID NO: 19508 - RNA, 122 nt, synthetic construct
  source 1..122: mol_type = other RNA
cccgactctggctttcccccgttttagagctagaaatagcaagttaaaataaggctagtccgttatcaacttgaaaaagtggcaccgagtcggtgcatgtacacctgggggaaagccagagt

SEQ ID NO: 19509 - RNA, 122 nt, synthetic construct
  source 1..122: mol_type = other RNA
cccgactctggctttcccccgttttagagctagaaatagcaagttaaaataaggctagtccgttatcaacttgaaaaagtggcaccgagtcggtgcaacatgtagacctgggggaaagccag

SEQ ID NO: 19510 - RNA, 122 nt, synthetic construct
  source 1..122: mol_type = other RNA
gcccgactctggctttcccccgttttagagctagaaatagcaagttaaaataaggctagtccgttatcaacttgaaaaagtggcaccgagtcggtgcatgtacacctgggggaaagccagag

SEQ ID NO: 19511 - RNA, 123 nt, synthetic construct
  source 1..123: mol_type = other RNA
cccgactctggctttcccccgttttagagctagaaatagcaagttaaaataaggctagtccgttatcaacttgaaaaagtggcaccgagtcggtgcacatgtaaacctgggggaaagccagag

SEQ ID NO: 19512 - RNA, 123 nt, synthetic construct
  source 1..123: mol_type = other RNA
cccgactctggctttcccccgttttagagctagaaatagcaagttaaaataaggctagtccgttatcaacttgaaaaagtggcaccgagtcggtgcacatgtatacctgggggaaagccagag

SEQ ID NO: 19513 - RNA, 123 nt, synthetic construct
  source 1..123: mol_type = other RNA
cccgactctggctttcccccgttttagagctagaaatagcaagttaaaataaggctagtccgttatcaacttgaaaaagtggcaccgagtcggtgcacatgtagacctgggggaaagccagag

SEQ ID NO: 19514 - RNA, 123 nt, synthetic construct
  source 1..123: mol_type = other RNA
cccgactctggctttcccccgttttagagctagaaatagcaagttaaaataaggctagtccgttatcaacttgaaaaagtggcaccgagtcggtgcgaacatgtacacctgggggaaagccag

SEQ ID NO: 19515 - RNA, 123 nt, synthetic construct
  source 1..123: mol_type = other RNA
cccgactctggctttcccccgttttagagctagaaatagcaagttaaaataaggctagtccgttatcaacttgaaaaagtggcaccgagtcggtgcacatgtacacctgggggaaagccagag

SEQ ID NO: 19516 - RNA, 123 nt, synthetic construct
  source 1..123: mol_type = other RNA
cccgactctggctttcccccgttttagagctagaaatagcaagttaaaataaggctagtccgttatcaacttgaaaaagtggcaccgagtcggtgcatgtacacctgggggaaagccagagtc

SEQ ID NO: 19517 - RNA, 123 nt, synthetic construct
  source 1..123: mol_type = other RNA
cccgactctggctttcccccgttttagagctagaaatagcaagttaaaataaggctagtccgttatcaacttgaaaaagtggcaccgagtcggtgcacatgtacacctgggggaaagcctttt

SEQ ID NO: 19518 - RNA, 123 nt, synthetic construct
  source 1..123: mol_type = other RNA
cccgactctggctttcccccgttttagagctagaaatagcaagttaaaataaggctagtccgttatcaacttgaaaaagtggcaccgagtcggtgcgtacacctgggggaaagccagagtttt

SEQ ID NO: 19519 - RNA, 123 nt, synthetic construct
  source 1..123: mol_type = other RNA
cccgactctggctttcccccgttttagagctagaaatagcaagttaaaataaggctagtccgttatcaacttgaaaaagtggcaccgagtcggtgcatgtacacctgggggaaagccagtttt

SEQ ID NO: 19520 - RNA, 124 nt, synthetic construct
  source 1..124: mol_type = other RNA
gcccgactctggctttcccccgttttagagctagaaatagcaagttaaaataaggctagtccgttatcaacttgaaaaagtggcaccgagtcggtgcgaacatgtacacctgggggaaagccag

SEQ ID NO: 19521 - RNA, 124 nt, synthetic construct
  source 1..124: mol_type = other RNA
cccgactctggctttcccccgttttagagctagaaatagcaagttaaaataaggctagtccgttatcaacttgaaaaagtggcaccgagtcggtgcaacatgtaaacctgggggaaagccagag

SEQ ID NO: 19522 - RNA, 124 nt, synthetic construct
  source 1..124: mol_type = other RNA
cccgactctggctttcccccgttttagagctagaaatagcaagttaaaataaggctagtccgttatcaacttgaaaaagtggcaccgagtcggtgcaacatgtagacctgggggaaagccagag

SEQ ID NO: 19523 - RNA, 124 nt, synthetic construct
  source 1..124: mol_type = other RNA
gcccgactctggctttcccccgttttagagctagaaatagcaagttaaaataaggctagtccgttatcaacttgaaaaagtggcaccgagtcggtgcatgtacacctgggggaaagccagagtc

SEQ ID NO: 19524 - RNA, 124 nt, synthetic construct
  source 1..124: mol_type = other RNA
cccgactctggctttcccccgttttagagctagaaatagcaagttaaaataaggctagtccgttatcaacttgaaaaagtggcaccgagtcggtgcaacatgtacacctgggggaaagccagag

SEQ ID NO: 19525 - RNA, 124 nt, synthetic construct
  source 1..124: mol_type = other RNA
gcccgactctggctttcccccgttttagagctagaaatagcaagttaaaataaggctagtccgttatcaacttgaaaaagtggcaccgagtcggtgcacatgtacacctgggggaaagccagag

SEQ ID NO: 19526 - RNA, 124 nt, synthetic construct
  source 1..124: mol_type = other RNA
cccgactctggctttcccccgttttagagctagaaatagcaagttaaaataaggctagtccgttatcaacttgaaaaagtggcaccgagtcggtgcacatgtacacctgggggaaagccagagt

SEQ ID NO: 19527 - RNA, 124 nt, synthetic construct
  source 1..124: mol_type = other RNA
cccgactctggctttcccccgttttagagctagaaatagcaagttaaaataaggctagtccgttatcaacttgaaaaagtggcaccgagtcggtgcaacatgtatacctgggggaaagccagag

SEQ ID NO: 19528 - RNA, 125 nt, synthetic construct
  source 1..125: mol_type = other RNA
cccgactctggctttcccccgttttagagctagaaatagcaagttaaaataaggctagtccgttatcaacttgaaaaagtggcaccgagtcggtgcacatgtagacctgggggaaagccagtttt

SEQ ID NO: 19529 - RNA, 125 nt, synthetic construct
  source 1..125: mol_type = other RNA
cccgactctggctttcccccgttttagagctagaaatagcaagttaaaataaggctagtccgttatcaacttgaaaaagtggcaccgagtcggtgcacatgtacacctgggggaaagccagtttt

SEQ ID NO: 19530 - RNA, 125 nt, synthetic construct
  source 1..125: mol_type = other RNA
cccgactctggctttcccccgttttagagctagaaatagcaagttaaaataaggctagtccgttatcaacttgaaaaagtggcaccgagtcggtgcgtacacctgggggaaagccagagtctttt

SEQ ID NO: 19531 - RNA, 125 nt, synthetic construct
  source 1..125: mol_type = other RNA
cccgactctggctttcccccgttttagagctagaaatagcaagttaaaataaggctagtccgttatcaacttgaaaaagtggcaccgagtcggtgcatgtacacctgggggaaagccagagtttt

SEQ ID NO: 19532 - RNA, 125 nt, synthetic construct
  source 1..125: mol_type = other RNA
cccgactctggctttcccccgttttagagctagaaatagcaagttaaaataaggctagtccgttatcaacttgaaaaagtggcaccgagtcggtgcacatgtaaacctgggggaaagccagtttt

SEQ ID NO: 19533 - RNA, 125 nt, synthetic construct
  source 1..125: mol_type = other RNA
cccgactctggctttcccccgttttagagctagaaatagcaagttaaaataaggctagtccgttatcaacttgaaaaagtggcaccgagtcggtgcgaacatgtacacctgggggaaagcctttt

SEQ ID NO: 19534 - RNA, 125 nt, synthetic construct
  source 1..125: mol_type = other RNA
cccgactctggctttcccccgttttagagctagaaatagcaagttaaaataaggctagtccgttatcaacttgaaaaagtggcaccgagtcggtgcacatgtacacctgggggaaagccagagtc

SEQ ID NO: 19535 - RNA, 125 nt, synthetic construct
  source 1..125: mol_type = other RNA
cccgactctggctttcccccgttttagagctagaaatagcaagttaaaataaggctagtccgttatcaacttgaaaaagtggcaccgagtcggtgcgaacatgtacacctgggggaaagccagag

SEQ ID NO: 19536 - RNA, 125 nt, synthetic construct
  source 1..125: mol_type = other RNA
cccgactctggctttcccccgttttagagctagaaatagcaagttaaaataaggctagtccgttatcaacttgaaaaagtggcaccgagtcggtgcacatgtatacctgggggaaagccagtttt

SEQ ID NO: 19537 - RNA, 125 nt, synthetic construct
  source 1..125: mol_type = other RNA
cccgactctggctttcccccgttttagagctagaaatagcaagttaaaataaggctagtccgttatcaacttgaaaaagtggcaccgagtcggtgcaacatgtacacctgggggaaagccagagt

SEQ ID NO: 19538 - RNA, 126 nt, synthetic construct
  source 1..126: mol_type = other RNA
gcccgactctggctttcccccgttttagagctagaaatagcaagttaaaataaggctagtccgttatcaacttgaaaaagtggcaccgagtcggtgcgaacatgtacacctgggggaaagccagag

SEQ ID NO: 19539 - RNA, 126 nt, synthetic construct
  source 1..126: mol_type = other RNA
cccgactctggctttcccccgttttagagctagaaatagcaagttaaaataaggctagtccgttatcaacttgaaaaagtggcaccgagtcggtgcaacatgtatacctgggggaaagccagtttt

SEQ ID NO: 19540 - RNA, 126 nt, synthetic construct
  source 1..126: mol_type = other RNA
cccgactctggctttcccccgttttagagctagaaatagcaagttaaaataaggctagtccgttatcaacttgaaaaagtggcaccgagtcggtgcaacatgtagacctgggggaaagccagtttt

SEQ ID NO: 19541 - RNA, 126 nt, synthetic construct
  source 1..126: mol_type = other RNA
gcccgactctggctttcccccgttttagagctagaaatagcaagttaaaataaggctagtccgttatcaacttgaaaaagtggcaccgagtcggtgcacatgtacacctgggggaaagccagagtc

SEQ ID NO: 19542 - RNA, 126 nt, synthetic construct
  source 1..126: mol_type = other RNA
cccgactctggctttcccccgttttagagctagaaatagcaagttaaaataaggctagtccgttatcaacttgaaaaagtggcaccgagtcggtgcatgtacacctgggggaaagccagagttttt

SEQ ID NO: 19543 - RNA, 126 nt, synthetic construct
  source 1..126: mol_type = other RNA
cccgactctggctttcccccgttttagagctagaaatagcaagttaaaataaggctagtccgttatcaacttgaaaaagtggcaccgagtcggtgcgaacatgtacacctgggggaaagccagagt

SEQ ID NO: 19544 - RNA, 126 nt, synthetic construct
  source 1..126: mol_type = other RNA
cccgactctggctttcccccgttttagagctagaaatagcaagttaaaataaggctagtccgttatcaacttgaaaaagtggcaccgagtcggtgcaacatgtaaacctgggggaaagccagtttt

SEQ ID NO: 19545 - RNA, 126 nt, synthetic construct
  source 1..126: mol_type = other RNA
cccgactctggctttcccccgttttagagctagaaatagcaagttaaaataaggctagtccgttatcaacttgaaaaagtggcaccgagtcggtgcaacatgtacacctgggggaaagccagagtc

SEQ ID NO: 19546 - RNA, 127 nt, synthetic construct
  source 1..127: mol_type = other RNA
cccgactctggctttcccccgttttagagctagaaatagcaagttaaaataaggctagtccgttatcaacttgaaaaagtggcaccgagtcggtgcacatgtatacctgggggaaagccagagtttt

SEQ ID NO: 19547 - RNA, 127 nt, synthetic construct
  source 1..127: mol_type = other RNA
cccgactctggctttcccccgttttagagctagaaatagcaagttaaaataaggctagtccgttatcaacttgaaaaagtggcaccgagtcggtgcatgtacacctgggggaaagccagagtctttt

SEQ ID NO: 19548 - RNA, 127 nt, synthetic construct
  source 1..127: mol_type = other RNA
cccgactctggctttcccccgttttagagctagaaatagcaagttaaaataaggctagtccgttatcaacttgaaaaagtggcaccgagtcggtgcacatgtacacctgggggaaagccagagtttt

SEQ ID NO: 19549 - RNA, 127 nt, synthetic construct
  source 1..127: mol_type = other RNA
cccgactctggctttcccccgttttagagctagaaatagcaagttaaaataaggctagtccgttatcaacttgaaaaagtggcaccgagtcggtgcacatgtagacctgggggaaagccagagtttt

SEQ ID NO: 19550 - RNA, 127 nt, synthetic construct
  source 1..127: mol_type = other RNA
cccgactctggctttcccccgttttagagctagaaatagcaagttaaaataaggctagtccgttatcaacttgaaaaagtggcaccgagtcggtgcgaacatgtacacctgggggaaagccagagtc

SEQ ID NO: 19551 - RNA, 127 nt, synthetic construct
  source 1..127: mol_type = other RNA
cccgactctggctttcccccgttttagagctagaaatagcaagttaaaataaggctagtccgttatcaacttgaaaaagtggcaccgagtcggtgcgaacatgtacacctgggggaaagccagtttt

SEQ ID NO: 19552 - RNA, 127 nt, synthetic construct
  source 1..127: mol_type = other RNA
cccgactctggctttcccccgttttagagctagaaatagcaagttaaaataaggctagtccgttatcaacttgaaaaagtggcaccgagtcggtgcacatgtaaacctgggggaaagccagagtttt

SEQ ID NO: 19553 - RNA, 128 nt, synthetic construct
  source 1..128: mol_type = other RNA
cccgactctggctttcccccgttttagagctagaaatagcaagttaaaataaggctagtccgttatcaacttgaaaaagtggcaccgagtcggtgcaacatgtaaacctgggggaaagccagagtttt

SEQ ID NO: 19554 - RNA, 128 nt, synthetic construct
  source 1..128: mol_type = other RNA
cccgactctggctttcccccgttttagagctagaaatagcaagttaaaataaggctagtccgttatcaacttgaaaaagtggcaccgagtcggtgcaacatgtacacctgggggaaagccagagtttt

SEQ ID NO: 19555 - RNA, 128 nt, synthetic construct
  source 1..128: mol_type = other RNA
cccgactctggctttcccccgttttagagctagaaatagcaagttaaaataaggctagtccgttatcaacttgaaaaagtggcaccgagtcggtgcaacatgtagacctgggggaaagccagagtttt

SEQ ID NO: 19556 - RNA, 128 nt, synthetic construct
  source 1..128: mol_type = other RNA
cccgactctggctttcccccgttttagagctagaaatagcaagttaaaataaggctagtccgttatcaacttgaaaaagtggcaccgagtcggtgcaacatgtatacctgggggaaagccagagtttt

SEQ ID NO: 19557 - RNA, 128 nt, synthetic construct
  source 1..128: mol_type = other RNA
cccgactctggctttcccccgttttagagctagaaatagcaagttaaaataaggctagtccgttatcaacttgaaaaagtggcaccgagtcggtgcacatgtacacctgggggaaagccagagttttt

SEQ ID NO: 19558 - RNA, 129 nt, synthetic construct
  source 1..129: mol_type = other RNA
cccgactctggctttcccccgttttagagctagaaatagcaagttaaaataaggctagtccgttatcaacttgaaaaagtggcaccgagtcggtgcgaacatgtacacctgggggaaagccagagtttt

SEQ ID NO: 19559 - RNA, 129 nt, synthetic construct
  source 1..129: mol_type = other RNA
cccgactctggctttcccccgttttagagctagaaatagcaagttaaaataaggctagtccgttatcaacttgaaaaagtggcaccgagtcggtgcacatgtacacctgggggaaagccagagtctttt

SEQ ID NO: 19560 - RNA, 129 nt, synthetic construct
  source 1..129: mol_type = other RNA
cccgactctggctttcccccgttttagagctagaaatagcaagttaaaataaggctagtccgttatcaacttgaaaaagtggcaccgagtcggtgcaacatgtacacctgggggaaagccagagttttt

SEQ ID NO: 19561 - RNA, 130 nt, synthetic construct
  source 1..130: mol_type = other RNA
cccgactctggctttcccccgttttagagctagaaatagcaagttaaaataaggctagtccgttatcaacttgaaaaagtggcaccgagtcggtgcaacatgtacacctgggggaaagccagagtctttt

SEQ ID NO: 19562 - RNA, 130 nt, synthetic construct
  source 1..130: mol_type = other RNA
cccgactctggctttcccccgttttagagctagaaatagcaagttaaaataaggctagtccgttatcaacttgaaaaagtggcaccgagtcggtgcgaacatgtacacctgggggaaagccagagttttt

SEQ ID NO: 19563 - RNA, 131 nt, synthetic construct
  source 1..131: mol_type = other RNA
cccgactctggctttcccccgttttagagctagaaatagcaagttaaaataaggctagtccgttatcaacttgaaaaagtggcaccgagtcggtgcgaacatgtacacctgggggaaagccagagtctttt

SEQ ID NO: 19564 - RNA, 91 nt, synthetic construct
  source 1..91: mol_type = other RNA
atccccacactcacagttttagagctagaaatagcaagttaaaataaggctagtccgttatcaacttgaaaaagtggcaccgagtcggtgc

SEQ ID NO: 19565 - RNA, 95 nt, synthetic construct
  source 1..95: mol_type = other RNA
atccccacactcacagttttagagctagaaatagcaagttaaaataaggctagtccgttatcaacttgaaaaagtggcaccgagtcggtgctttt

SEQ ID NO: 19566 - RNA, 96 nt, synthetic construct
  source 1..96: mol_type = other RNA
cctccatccccacactcacagttttagagctagaaatagcaagttaaaataaggctagtccgttatcaacttgaaaaagtggcaccgagtcggtgc

SEQ ID NO: 19567 - RNA, 100 nt, synthetic construct
  source 1..100: mol_type = other RNA
cctccatccccacactcacagttttagagctagaaatagcaagttaaaataaggctagtccgttatcaacttgaaaaagtggcaccgagtcggtgctttt

SEQ ID NO: 19568 - RNA, 16 nt, synthetic construct
  source 1..16: mol_type = other RNA
gtcctgccatttcacc

SEQ ID NO: 19569 - RNA, 17 nt, synthetic construct
  source 1..17: mol_type = other RNA
ggtcctgccatttcacc

SEQ ID NO: 19570 - RNA, 18 nt, synthetic construct
  source 1..18: mol_type = other RNA
aggtcctgccatttcacc

SEQ ID NO: 19571 - RNA, 19 nt, synthetic construct
  source 1..19: mol_type = other RNA
caggtcctgccatttcacc

SEQ ID NO: 19572 - RNA, 20 nt, synthetic construct
  source 1..20: mol_type = other RNA
acaggtcctgccatttcacc

SEQ ID NO: 19573 - RNA, 21 nt, synthetic construct
  source 1..21: mol_type = other RNA
gacaggtcctgccatttcacc

SEQ ID NO: 19574 - RNA, 22 nt, synthetic construct
  source 1..22: mol_type = other RNA
cgacaggtcctgccatttcacc

SEQ ID NO: 19575-19579 - skipped (5 entries)

SEQ ID NO: 19580 - RNA, 10 nt, synthetic construct
  source 1..10: mol_type = other RNA
gaaatggcag

SEQ ID NO: 19581 - RNA, 11 nt, synthetic construct
  source 1..11: mol_type = other RNA
gaaatggcagg

SEQ ID NO: 19582 - RNA, 12 nt, synthetic construct
  source 1..12: mol_type = other RNA
gaaatggcagga

SEQ ID NO: 19583 - RNA, 13 nt, synthetic construct
  source 1..13: mol_type = other RNA
gaaatggcaggac

SEQ ID NO: 19584 - RNA, 14 nt, synthetic construct
  source 1..14: mol_type = other RNA
gaaatggcaggacc

SEQ ID NO: 19585 - RNA, 15 nt, synthetic construct
  source 1..15: mol_type = other RNA
gaaatggcaggacct

SEQ ID NO: 19586 - RNA, 16 nt, synthetic construct
  source 1..16: mol_type = other RNA
gaaatggcaggacctg

SEQ ID NO: 19587 - RNA, 17 nt, synthetic construct
  source 1..17: mol_type = other RNA
gaaatggcaggacctgt

SEQ ID NO: 19588 - RNA, 18 nt, synthetic construct
  source 1..18: mol_type = other RNA
gaaatggcaggacctgtc

SEQ ID NO: 19589 - RNA, 19 nt, synthetic construct
  source 1..19: mol_type = other RNA
gaaatggcaggacctgtcg

SEQ ID NO: 19590 - RNA, 17 nt, synthetic construct
  source 1..17: mol_type = other RNA
gtttacatgtttttagt

SEQ ID NO: 19591 - RNA, 17 nt, synthetic construct
  source 1..17: mol_type = other RNA
gtgtacatgtttttagt

SEQ ID NO: 19592 - RNA, 17 nt, synthetic construct
  source 1..17: mol_type = other RNA
gtttacatgttcttagt

SEQ ID NO: 19593 - RNA, 17 nt, synthetic construct
  source 1..17: mol_type = other RNA
gtttacatgttcctggt

SEQ ID NO: 19594 - RNA, 17 nt, synthetic construct
  source 1..17: mol_type = other RNA
gtgtacatgtttttggt

SEQ ID NO: 19595 - RNA, 17 nt, synthetic construct
  source 1..17: mol_type = other RNA
gtttacatgttcttggt

SEQ ID NO: 19596 - RNA, 17 nt, synthetic construct
  source 1..17: mol_type = other RNA
gtctacatgtttttagt

SEQ ID NO: 19597 - RNA, 17 nt, synthetic construct
  source 1..17: mol_type = other RNA
gtgtacatgttcttagt

SEQ ID NO: 19598 - RNA, 17 nt, synthetic construct
  source 1..17: mol_type = other RNA
gtttacatgtttttggt

SEQ ID NO: 19599 - RNA, 17 nt, synthetic construct
  source 1..17: mol_type = other RNA
gtatacatgtttttagt

SEQ ID NO: 19600 - RNA, 17 nt, synthetic construct
  source 1..17: mol_type = other RNA
gtttacatgtttctggt

SEQ ID NO: 19601 - RNA, 17 nt, synthetic construct
  source 1..17: mol_type = other RNA
gtgtacatgttcttggt

SEQ ID NO: 19602 - RNA, 17 nt, synthetic construct
  source 1..17: mol_type = other RNA
gtctacatgttcttagt

SEQ ID NO: 19603 - RNA, 17 nt, synthetic construct
  source 1..17: mol_type = other RNA
gtgtacatgttcctggt

SEQ ID NO: 19604 - RNA, 17 nt, synthetic construct
  source 1..17: mol_type = other RNA
gtatacatgttcctggt

SEQ ID NO: 19605 - RNA, 17 nt, synthetic construct
  source 1..17: mol_type = other RNA
gtatacatgttcttagt

SEQ ID NO: 19606 - RNA, 17 nt, synthetic construct
  source 1..17: mol_type = other RNA
gtatacatgttcttggt

SEQ ID NO: 19607 - RNA, 17 nt, synthetic construct
  source 1..17: mol_type = other RNA
gtatacatgtttctggt

SEQ ID NO: 19608 - RNA, 17 nt, synthetic construct
  source 1..17: mol_type = other RNA
gtatacatgtttttggt

SEQ ID NO: 19609 - RNA, 17 nt, synthetic construct
  source 1..17: mol_type = other RNA
gtctacatgtttttggt

SEQ ID NO: 19610 - RNA, 17 nt, synthetic construct
  source 1..17: mol_type = other RNA
gtctacatgtttctggt

SEQ ID NO: 19611 - RNA, 17 nt, synthetic construct
  source 1..17: mol_type = other RNA
gtctacatgttcttggt

SEQ ID NO: 19612 - RNA, 17 nt, synthetic construct
  source 1..17: mol_type = other RNA
gtctacatgttcctggt

SEQ ID NO: 19613 - RNA, 17 nt, synthetic construct
  source 1..17: mol_type = other RNA
gtgtacatgtttctggt

SEQ ID NO: 19614 - RNA, 18 nt, synthetic construct
  source 1..18: mol_type = other RNA
ggtatacatgttcttggt

SEQ ID NO: 19615 - RNA, 18 nt, synthetic construct
  source 1..18: mol_type = other RNA
ggtatacatgttcctggt

SEQ ID NO: 19616 - RNA, 18 nt, synthetic construct
  source 1..18: mol_type = other RNA
ggtgtacatgttcttagt

SEQ ID NO: 19617 - RNA, 18 nt, synthetic construct
  source 1..18: mol_type = other RNA
ggtatacatgtttctggt

SEQ ID NO: 19618 - RNA, 18 nt, synthetic construct
  source 1..18: mol_type = other RNA
ggtatacatgtttttagt

SEQ ID NO: 19619 - RNA, 18 nt, synthetic construct
  source 1..18: mol_type = other RNA
ggtgtacatgttcttggt

SEQ ID NO: 19620 - RNA, 18 nt, synthetic construct
  source 1..18: mol_type = other RNA
ggtgtacatgttcctggt

SEQ ID NO: 19621 - RNA, 18 nt, synthetic construct
  source 1..18: mol_type = other RNA
ggtgtacatgtttttggt

SEQ ID NO: 19622 - RNA, 18 nt, synthetic construct
  source 1..18: mol_type = other RNA
ggtttacatgtttttggt

SEQ ID NO: 19623 - RNA, 18 nt, synthetic construct
  source 1..18: mol_type = other RNA
ggtttacatgttcttagt

SEQ ID NO: 19624 - RNA, 18 nt, synthetic construct
  source 1..18: mol_type = other RNA
ggtttacatgttcctggt

SEQ ID NO: 19625 - RNA, 18 nt, synthetic construct
  source 1..18: mol_type = other RNA
ggtttacatgttcttggt

SEQ ID NO: 19626 - RNA, 18 nt, synthetic construct
  source 1..18: mol_type = other RNA
ggtttacatgtttttagt

SEQ ID NO: 19627 - RNA, 18 nt, synthetic construct
  source 1..18: mol_type = other RNA
ggtgtacatgtttttagt

SEQ ID NO: 19628 - RNA, 18 nt, synthetic construct
  source 1..18: mol_type = other RNA
ggtatacatgttcttagt

SEQ ID NO: 19629 - RNA, 18 nt, synthetic construct
  source 1..18: mol_type = other RNA
ggtgtacatgtttctggt

SEQ ID NO: 19630 - RNA, 18 nt, synthetic construct
  source 1..18: mol_type = other RNA
ggtctacatgttcctggt

SEQ ID NO: 19631 - RNA, 18 nt, synthetic construct
  source 1..18: mol_type = other RNA
ggtctacatgtttttagt

SEQ ID NO: 19632 - RNA, 18 nt, synthetic construct
  source 1..18: mol_type = other RNA
ggtctacatgtttctggt

SEQ ID NO: 19633 - RNA, 18 nt, synthetic construct
  source 1..18: mol_type = other RNA
ggtctacatgttcttagt

SEQ ID NO: 19634 - RNA, 18 nt, synthetic construct
  source 1..18: mol_type = other RNA
ggtctacatgtttttggt

SEQ ID NO: 19635 - RNA, 18 nt, synthetic construct
  source 1..18: mol_type = other RNA
ggtctacatgttcttggt

SEQ ID NO: 19636 - RNA, 18 nt, synthetic construct
  source 1..18: mol_type = other RNA
ggtatacatgtttttggt

SEQ ID NO: 19637 - RNA, 18 nt, synthetic construct
  source 1..18: mol_type = other RNA
ggtttacatgtttctggt

SEQ ID NO: 19638 - RNA, 19 nt, synthetic construct
  source 1..19: mol_type = other RNA
aggtttacatgttcttagt

SEQ ID NO: 19639 - RNA, 19 nt, synthetic construct
  source 1..19: mol_type = other RNA
aggtatacatgtttttagt

SEQ ID NO: 19640 - RNA, 19 nt, synthetic construct
  source 1..19: mol_type = other RNA
aggtatacatgtttctggt

SEQ ID NO: 19641 - RNA, 19 nt, synthetic construct
  source 1..19: mol_type = other RNA
aggtatacatgttcttggt

SEQ ID NO: 19642 - RNA, 19 nt, synthetic construct
  source 1..19: mol_type = other RNA
aggtatacatgttcttagt

SEQ ID NO: 19643 - RNA, 19 nt, synthetic construct
  source 1..19: mol_type = other RNA
aggtatacatgttcctggt

SEQ ID NO: 19644 - RNA, 19 nt, synthetic construct
  source 1..19: mol_type = other RNA
aggtttacatgtttttggt

SEQ ID NO: 19645 - RNA, 19 nt, synthetic construct
  source 1..19: mol_type = other RNA
aggtctacatgttcttagt

SEQ ID NO: 19646 - RNA, 19 nt, synthetic construct
  source 1..19: mol_type = other RNA
aggtttacatgtttctggt

SEQ ID NO: 19647 - RNA, 19 nt, synthetic construct
  source 1..19: mol_type = other RNA
aggtttacatgtttttagt

SEQ ID NO: 19648 - RNA, 19 nt, synthetic construct
  source 1..19: mol_type = other RNA
aggtctacatgttcctggt

SEQ ID NO: 19649 - RNA, 19 nt, synthetic construct
  source 1..19: mol_type = other RNA
aggtatacatgtttttggt

SEQ ID NO: 19650 - RNA, 19 nt, synthetic construct
  source 1..19: mol_type = other RNA
aggtctacatgttcttggt

SEQ ID NO: 19651 - RNA, 19 nt, synthetic construct
  source 1..19: mol_type = other RNA
aggtttacatgttcctggt

SEQ ID NO: 19652 - RNA, 19 nt, synthetic construct
  source 1..19: mol_type = other RNA
aggtctacatgtttctggt

SEQ ID NO: 19653 - RNA, 19 nt, synthetic construct
  source 1..19: mol_type = other RNA
aggtgtacatgttcttggt

SEQ ID NO: 19654 - RNA, 19 nt, synthetic construct
  source 1..19: mol_type = other RNA
aggtgtacatgtttttggt

SEQ ID NO: 19655 - RNA, 19 nt, synthetic construct
  source 1..19: mol_type = other RNA
aggtgtacatgtttttagt

SEQ ID NO: 19656 - RNA, 19 nt, synthetic construct
  source 1..19: mol_type = other RNA
aggtgtacatgtttctggt

SEQ ID NO: 19657 - RNA, 19 nt, synthetic construct
  source 1..19: mol_type = other RNA
aggtctacatgtttttggt

SEQ ID NO: 19658 - RNA, 19 nt, synthetic construct
  source 1..19: mol_type = other RNA
aggtgtacatgttcttagt

SEQ ID NO: 19659 - RNA, 19 nt, synthetic construct
  source 1..19: mol_type = other RNA
aggtgtacatgttcctggt

SEQ ID NO: 19660 - RNA, 19 nt, synthetic construct
  source 1..19: mol_type = other RNA
aggtttacatgttcttggt

SEQ ID NO: 19661 - RNA, 19 nt, synthetic construct
  source 1..19: mol_type = other RNA
aggtctacatgtttttagt

SEQ ID NO: 19662 - RNA, 20 nt, synthetic construct
  source 1..20: mol_type = other RNA
caggtttacatgttcctggt

SEQ ID NO: 19663 - RNA, 20 nt, synthetic construct
  source 1..20: mol_type = other RNA
caggtttacatgtttttggt

SEQ ID NO: 19664 - RNA, 20 nt, synthetic construct
  source 1..20: mol_type = other RNA
caggtgtacatgttcttggt

SEQ ID NO: 19665 - RNA, 20 nt, synthetic construct
  source 1..20: mol_type = other RNA
caggtatacatgttcttagt

SEQ ID NO: 19666 - RNA, 20 nt, synthetic construct
  source 1..20: mol_type = other RNA
caggtgtacatgttcttagt

SEQ ID NO: 19667 - RNA, 20 nt, synthetic construct
  source 1..20: mol_type = other RNA
caggtctacatgtttctggt

SEQ ID NO: 19668 - RNA, 20 nt, synthetic construct
  source 1..20: mol_type = other RNA
caggtctacatgttcttggt

SEQ ID NO: 19669 - RNA, 20 nt, synthetic construct
  source 1..20: mol_type = other RNA
caggtgtacatgtttctggt

SEQ ID NO: 19670 - RNA, 20 nt, synthetic construct
  source 1..20: mol_type = other RNA
caggtatacatgttcttggt

SEQ ID NO: 19671 - RNA, 20 nt, synthetic construct
  source 1..20: mol_type = other RNA
caggtatacatgtttctggt

SEQ ID NO: 19672 - RNA, 20 nt, synthetic construct
  source 1..20: mol_type = other RNA
caggtctacatgtttttagt

SEQ ID NO: 19673 - RNA, 20 nt, synthetic construct
  source 1..20: mol_type = other RNA
caggtatacatgtttttggt

SEQ ID NO: 19674 - RNA, 20 nt, synthetic construct
  source 1..20: mol_type = other RNA
caggtctacatgttcctggt

SEQ ID NO: 19675 - RNA, 20 nt, synthetic construct
  source 1..20: mol_type = other RNA
caggtctacatgttcttagt

SEQ ID NO: 19676 - RNA, 20 nt, synthetic construct
  source 1..20: mol_type = other RNA
caggtttacatgttcttagt

SEQ ID NO: 19677 - RNA, 20 nt, synthetic construct
  source 1..20: mol_type = other RNA
caggtatacatgtttttagt

SEQ ID NO: 19678 - RNA, 20 nt, synthetic construct
  source 1..20: mol_type = other RNA
caggtttacatgtttttagt

SEQ ID NO: 19679 - RNA, 20 nt, synthetic construct
  source 1..20: mol_type = other RNA
caggtttacatgttcttggt

SEQ ID NO: 19680 - RNA, 20 nt, synthetic construct
  source 1..20: mol_type = other RNA
caggtttacatgtttctggt

SEQ ID NO: 19681 - RNA, 20 nt, synthetic construct
  source 1..20: mol_type = other RNA
caggtgtacatgttcctggt

SEQ ID NO: 19682 - RNA, 20 nt, synthetic construct
  source 1..20: mol_type = other RNA
caggtatacatgttcctggt

SEQ ID NO: 19683 - RNA, 20 nt, synthetic construct
  source 1..20: mol_type = other RNA
caggtgtacatgtttttggt

SEQ ID NO: 19684 - RNA, 20 nt, synthetic construct
  source 1..20: mol_type = other RNA
caggtctacatgtttttggt

SEQ ID NO: 19685 - RNA, 20 nt, synthetic construct
  source 1..20: mol_type = other RNA
caggtgtacatgtttttagt

SEQ ID NO: 19686 - RNA, 21 nt, synthetic construct
  source 1..21: mol_type = other RNA
ccaggtctacatgttcttagt

SEQ ID NO: 19687 - RNA, 21 nt, synthetic construct
  source 1..21: mol_type = other RNA
ccaggtctacatgttcctggt

SEQ ID NO: 19688 - RNA, 21 nt, synthetic construct
  source 1..21: mol_type = other RNA
ccaggtctacatgtttttggt

SEQ ID NO: 19689 - RNA, 21 nt, synthetic construct
  source 1..21: mol_type = other RNA
ccaggtctacatgtttttagt

SEQ ID NO: 19690 - RNA, 21 nt, synthetic construct
  source 1..21: mol_type = other RNA
ccaggtctacatgtttctggt

SEQ ID NO: 19691 - RNA, 21 nt, synthetic construct
  source 1..21: mol_type = other RNA
ccaggtatacatgttcttggt

SEQ ID NO: 19692 - RNA, 21 nt, synthetic construct
  source 1..21: mol_type = other RNA
ccaggtctacatgttcttggt

SEQ ID NO: 19693 - RNA, 21 nt, synthetic construct
  source 1..21: mol_type = other RNA
ccaggtatacatgtttttggt

SEQ ID NO: 19694 - RNA, 21 nt, synthetic construct
  source 1..21: mol_type = other RNA
ccaggtttacatgttcttggt

SEQ ID NO: 19695 - RNA, 21 nt, synthetic construct
  source 1..21: mol_type = other RNA
ccaggtgtacatgttcttagt

SEQ ID NO: 19696 - RNA, 21 nt, synthetic construct
  source 1..21: mol_type = other RNA
ccaggtgtacatgtttttagt

SEQ ID NO: 19697 - RNA, 21 nt, synthetic construct
  source 1..21: mol_type = other RNA
ccaggtgtacatgtttttggt

SEQ ID NO: 19698 - RNA, 21 nt, synthetic construct
  source 1..21: mol_type = other RNA
ccaggtttacatgttcctggt

SEQ ID NO: 19699 - RNA, 21 nt, synthetic construct
  source 1..21: mol_type = other RNA
ccaggtttacatgttcttagt

SEQ ID NO: 19700 - RNA, 21 nt, synthetic construct
  source 1..21: mol_type = other RNA
ccaggtttacatgtttctggt

SEQ ID NO: 19701 - RNA, 21 nt, synthetic construct
  source 1..21: mol_type = other RNA
ccaggtgtacatgtttctggt

SEQ ID NO: 19702 - RNA, 21 nt, synthetic construct
  source 1..21: mol_type = other RNA
ccaggtttacatgtttttggt

SEQ ID NO: 19703 - RNA, 21 nt, synthetic construct
  source 1..21: mol_type = other RNA
ccaggtttacatgtttttagt

SEQ ID NO: 19704 - RNA, 21 nt, synthetic construct
  source 1..21: mol_type = other RNA
ccaggtgtacatgttcctggt

SEQ ID NO: 19705 - RNA, 21 nt, synthetic construct
  source 1..21: mol_type = other RNA
ccaggtatacatgttcctggt

SEQ ID NO: 19706 - RNA, 21 nt, synthetic construct
  source 1..21: mol_type = other RNA
ccaggtatacatgttcttagt

SEQ ID NO: 19707 - RNA, 21 nt, synthetic construct
  source 1..21: mol_type = other RNA
ccaggtgtacatgttcttggt

SEQ ID NO: 19708 - RNA, 21 nt, synthetic construct
  source 1..21: mol_type = other RNA
ccaggtatacatgtttctggt

SEQ ID NO: 19709 - RNA, 21 nt, synthetic construct
  source 1..21: mol_type = other RNA
ccaggtatacatgtttttagt

SEQ ID NO: 19710 - RNA, 22 nt, synthetic construct
  source 1..22: mol_type = other RNA
cccaggtatacatgttcctggt

SEQ ID NO: 19711 - RNA, 22 nt, synthetic construct
  source 1..22: mol_type = other RNA
cccaggtgtacatgttcttagt

SEQ ID NO: 19712 - RNA, 22 nt, synthetic construct
  source 1..22: mol_type = other RNA
cccaggtgtacatgtttttggt

SEQ ID NO: 19713 - RNA, 22 nt, synthetic construct
  source 1..22: mol_type = other RNA
cccaggtgtacatgtttctggt

SEQ ID NO: 19714 - RNA, 22 nt, synthetic construct
  source 1..22: mol_type = other RNA
cccaggtgtacatgttcttggt

SEQ ID NO: 19715 - RNA, 22 nt, synthetic construct
  source 1..22: mol_type = other RNA
cccaggtttacatgtttttagt

SEQ ID NO: 19716 - RNA, 22 nt, synthetic construct
  source 1..22: mol_type = other RNA
cccaggtctacatgttcttagt

SEQ ID NO: 19717 - RNA, 22 nt, synthetic construct
  source 1..22: mol_type = other RNA
cccaggtatacatgttcttagt

SEQ ID NO: 19718 - RNA, 22 nt, synthetic construct
  source 1..22: mol_type = other RNA
cccaggtatacatgttcttggt

SEQ ID NO: 19719 - RNA, 22 nt, synthetic construct
  source 1..22: mol_type = other RNA
cccaggtatacatgtttctggt

SEQ ID NO: 19720 - RNA, 22 nt, synthetic construct
  source 1..22: mol_type = other RNA
cccaggtatacatgtttttagt

SEQ ID NO: 19721 - RNA, 22 nt, synthetic construct
  source 1..22: mol_type = other RNA
cccaggtatacatgtttttggt

SEQ ID NO: 19722 - RNA, 22 nt, synthetic construct
  source 1..22: mol_type = other RNA
cccaggtctacatgttcctggt

SEQ ID NO: 19723 - RNA, 22 nt, synthetic construct
  source 1..22: mol_type = other RNA
cccaggtctacatgtttctggt

SEQ ID NO: 19724 - RNA, 22 nt, synthetic construct
  source 1..22: mol_type = other RNA
cccaggtctacatgtttttagt

SEQ ID NO: 19725 - RNA, 22 nt, synthetic construct
  source 1..22: mol_type = other RNA
cccaggtctacatgttcttggt

SEQ ID NO: 19726 - RNA, 22 nt, synthetic construct
  source 1..22: mol_type = other RNA
cccaggtttacatgtttttggt

SEQ ID NO: 19727 - RNA, 22 nt, synthetic construct
  source 1..22: mol_type = other RNA
cccaggtttacatgtttctggt

SEQ ID NO: 19728 - RNA, 22 nt, synthetic construct
  source 1..22: mol_type = other RNA
cccaggtttacatgttcttggt

SEQ ID NO: 19729 - RNA, 22 nt, synthetic construct
  source 1..22: mol_type = other RNA
cccaggtttacatgttcctggt

SEQ ID NO: 19730 - RNA, 22 nt, synthetic construct
  source 1..22: mol_type = other RNA
cccaggtttacatgttcttagt

SEQ ID NO: 19731 - RNA, 22 nt, synthetic construct
  source 1..22: mol_type = other RNA
cccaggtctacatgtttttggt

SEQ ID NO: 19732 - RNA, 22 nt, synthetic construct
  source 1..22: mol_type = other RNA
cccaggtgtacatgttcctggt

SEQ ID NO: 19733 - RNA, 22 nt, synthetic construct
  source 1..22: mol_type = other RNA
cccaggtgtacatgtttttagt

SEQ ID NO: 19734 - RNA, 23 nt, synthetic construct
  source 1..23: mol_type = other RNA
ccccaggtttacatgttcttagt

SEQ ID NO: 19735 - RNA, 23 nt, synthetic construct
  source 1..23: mol_type = other RNA
ccccaggtttacatgttcttggt

SEQ ID NO: 19736 - RNA, 23 nt, synthetic construct
  source 1..23: mol_type = other RNA
ccccaggtttacatgttcctggt

SEQ ID NO: 19737 - RNA, 23 nt, synthetic construct
  source 1..23: mol_type = other RNA
ccccaggtttacatgtttctggt

SEQ ID NO: 19738 - RNA, 23 nt, synthetic construct
  source 1..23: mol_type = other RNA
ccccaggtttacatgtttttagt

SEQ ID NO: 19739 - RNA, 23 nt, synthetic construct
  source 1..23: mol_type = other RNA
ccccaggtttacatgtttttggt

SEQ ID NO: 19740 - RNA, 23 nt, synthetic construct
  source 1..23: mol_type = other RNA
ccccaggtgtacatgtttttggt

SEQ ID NO: 19741 - RNA, 23 nt, synthetic construct
  source 1..23: mol_type = other RNA
ccccaggtgtacatgtttttagt

SEQ ID NO: 19742 - RNA, 23 nt, synthetic construct
  source 1..23: mol_type = other RNA
ccccaggtgtacatgtttctggt

SEQ ID NO: 19743 - RNA, 23 nt, synthetic construct
  source 1..23: mol_type = other RNA
ccccaggtctacatgtttctggt

SEQ ID NO: 19744 - RNA, 23 nt, synthetic construct
  source 1..23: mol_type = other RNA
ccccaggtctacatgtttttggt

SEQ ID NO: 19745 - RNA, 23 nt, synthetic construct
  source 1..23: mol_type = other RNA
ccccaggtatacatgttcctggt

SEQ ID NO: 19746 - RNA, 23 nt, synthetic construct
  source 1..23: mol_type = other RNA
ccccaggtctacatgttcctggt

SEQ ID NO: 19747 - RNA, 23 nt, synthetic construct
  source 1..23: mol_type = other RNA
ccccaggtgtacatgttcttggt

SEQ ID NO: 19748 - RNA, 23 nt, synthetic construct
  source 1..23: mol_type = other RNA
ccccaggtgtacatgttcttagt

SEQ ID NO: 19749 - RNA, 23 nt, synthetic construct
  source 1..23: mol_type = other RNA
ccccaggtgtacatgttcctggt

SEQ ID NO: 19750 - RNA, 23 nt, synthetic construct
  source 1..23: mol_type = other RNA
ccccaggtctacatgtttttagt

SEQ ID NO: 19751 - RNA, 23 nt, synthetic construct
  source 1..23: mol_type = other RNA
ccccaggtctacatgttcttggt

SEQ ID NO: 19752 - RNA, 23 nt, synthetic construct
  source 1..23: mol_type = other RNA
ccccaggtctacatgttcttagt

SEQ ID NO: 19753 - RNA, 23 nt, synthetic construct
  source 1..23: mol_type = other RNA
ccccaggtatacatgttcttagt

SEQ ID NO: 19754 - RNA, 23 nt, synthetic construct
  source 1..23: mol_type = other RNA
ccccaggtatacatgtttttggt

SEQ ID NO: 19755 - RNA, 23 nt, synthetic construct
  source 1..23: mol_type = other RNA
ccccaggtatacatgtttttagt

SEQ ID NO: 19756 - RNA, 23 nt, synthetic construct
  source 1..23: mol_type = other RNA
ccccaggtatacatgtttctggt

SEQ ID NO: 19757 - RNA, 23 nt, synthetic construct
  source 1..23: mol_type = other RNA
ccccaggtatacatgttcttggt

SEQ ID NO: 19758 - RNA, 24 nt, synthetic construct
  source 1..24: mol_type = other RNA
cccccaggtatacatgtttttagt

SEQ ID NO: 19759 - RNA, 24 nt, synthetic construct
  source 1..24: mol_type = other RNA
cccccaggtctacatgtttttggt

SEQ ID NO: 19760 - RNA, 24 nt, synthetic construct
  source 1..24: mol_type = other RNA
cccccaggtatacatgttcttagt

SEQ ID NO: 19761 - RNA, 24 nt, synthetic construct
  source 1..24: mol_type = other RNA
cccccaggtatacatgttcttggt

SEQ ID NO: 19762 - RNA, 24 nt, synthetic construct
  source 1..24: mol_type = other RNA
cccccaggtatacatgtttctggt

SEQ ID NO: 19763 - RNA, 24 nt, synthetic construct
  source 1..24: mol_type = other RNA
cccccaggtttacatgtttttggt

SEQ ID NO: 19764 - RNA, 24 nt, synthetic construct
  source 1..24: mol_type = other RNA
cccccaggtctacatgttcctggt

SEQ ID NO: 19765 - RNA, 24 nt, synthetic construct
  source 1..24: mol_type = other RNA
cccccaggtctacatgttcttagt

SEQ ID NO: 19766 - RNA, 24 nt, synthetic construct
  source 1..24: mol_type = other RNA
cccccaggtctacatgttcttggt

SEQ ID NO: 19767 - RNA, 24 nt, synthetic construct
  source 1..24: mol_type = other RNA
cccccaggtctacatgtttctggt

SEQ ID NO: 19768 - RNA, 24 nt, synthetic construct
  source 1..24: mol_type = other RNA
cccccaggtctacatgtttttagt

SEQ ID NO: 19769 - RNA, 24 nt, synthetic construct
  source 1..24: mol_type = other RNA
cccccaggtgtacatgtttttagt

SEQ ID NO: 19770 - RNA, 24 nt, synthetic construct
  source 1..24: mol_type = other RNA
cccccaggtgtacatgtttctggt

SEQ ID NO: 19771 - RNA, 24 nt, synthetic construct
  source 1..24: mol_type = other RNA
cccccaggtttacatgttcctggt

SEQ ID NO: 19772 - RNA, 24 nt, synthetic construct
  source 1..24: mol_type = other RNA
cccccaggtgtacatgttcctggt

SEQ ID NO: 19773 - RNA, 24 nt, synthetic construct
  source 1..24: mol_type = other RNA
cccccaggtttacatgttcttggt

SEQ ID NO: 19774 - RNA, 24 nt, synthetic construct
  source 1..24: mol_type = other RNA
cccccaggtttacatgttcttagt

SEQ ID NO: 19775 - RNA, 24 nt, synthetic construct
  source 1..24: mol_type = other RNA
cccccaggtttacatgtttctggt

SEQ ID NO: 19776 - RNA, 24 nt, synthetic construct
  source 1..24: mol_type = other RNA
cccccaggtatacatgttcctggt

SEQ ID NO: 19777 - RNA, 24 nt, synthetic construct
  source 1..24: mol_type = other RNA
cccccaggtgtacatgttcttggt

SEQ ID NO: 19778 - RNA, 24 nt, synthetic construct
  source 1..24: mol_type = other RNA
cccccaggtatacatgtttttggt

SEQ ID NO: 19779 - RNA, 24 nt, synthetic construct
  source 1..24: mol_type = other RNA
cccccaggtgtacatgtttttggt

SEQ ID NO: 19780 - RNA, 24 nt, synthetic construct
  source 1..24: mol_type = other RNA
cccccaggtttacatgtttttagt

SEQ ID NO: 19781 - RNA, 24 nt, synthetic construct
  source 1..24: mol_type = other RNA
cccccaggtgtacatgttcttagt

SEQ ID NO: 19782 - RNA, 25 nt, synthetic construct
  source 1..25: mol_type = other RNA
tcccccaggtatacatgttcttagt

SEQ ID NO: 19783 - RNA, 25 nt, synthetic construct
  source 1..25: mol_type = other RNA
tcccccaggtttacatgttcttggt

SEQ ID NO: 19784 - RNA, 25 nt, synthetic construct
  source 1..25: mol_type = other RNA
tcccccaggtatacatgtttttggt

SEQ ID NO: 19785 - RNA, 25 nt, synthetic construct
  source 1..25: mol_type = other RNA
tcccccaggtttacatgtttttagt

SEQ ID NO: 19786 - RNA, 25 nt, synthetic construct
  source 1..25: mol_type = other RNA
tcccccaggtttacatgtttttggt

SEQ ID NO: 19787 - RNA, 25 nt, synthetic construct
  source 1..25: mol_type = other RNA
tcccccaggtgtacatgtttttagt

SEQ ID NO: 19788 - RNA, 25 nt, synthetic construct
  source 1..25: mol_type = other RNA
tcccccaggtctacatgttcttggt

SEQ ID NO: 19789 - RNA, 25 nt, synthetic construct
  source 1..25: mol_type = other RNA
tcccccaggtgtacatgtttctggt

SEQ ID NO: 19790 - RNA, 25 nt, synthetic construct
  source 1..25: mol_type = other RNA
tcccccaggtctacatgttcttagt

SEQ ID NO: 19791 - RNA, 25 nt, synthetic construct
  source 1..25: mol_type = other RNA
tcccccaggtgtacatgttcttagt

SEQ ID NO: 19792 - RNA, 25 nt, synthetic construct
  source 1..25: mol_type = other RNA
tcccccaggtgtacatgttcttggt

SEQ ID NO: 19793 - RNA, 25 nt, synthetic construct
  source 1..25: mol_type = other RNA
tcccccaggtttacatgttcctggt

SEQ ID NO: 19794 - RNA, 25 nt, synthetic construct
  source 1..25: mol_type = other RNA
tcccccaggtatacatgttcttggt

SEQ ID NO: 19795 - RNA, 25 nt, synthetic construct
  source 1..25: mol_type = other RNA
tcccccaggtatacatgtttctggt

SEQ ID NO: 19796 - RNA, 25 nt, synthetic construct
  source 1..25: mol_type = other RNA
tcccccaggtatacatgtttttagt

SEQ ID NO: 19797 - RNA, 25 nt, synthetic construct
  source 1..25: mol_type = other RNA
tcccccaggtatacatgttcctggt

SEQ ID NO: 19798 - RNA, 25 nt, synthetic construct
  source 1..25: mol_type = other RNA
tcccccaggtctacatgtttttagt

SEQ ID NO: 19799 - RNA, 25 nt, synthetic construct
  source 1..25: mol_type = other RNA
tcccccaggtctacatgttcctggt

SEQ ID NO: 19800 - RNA, 25 nt, synthetic construct
  source 1..25: mol_type = other RNA
tcccccaggtctacatgtttttggt

SEQ ID NO: 19801 - RNA, 25 nt, synthetic construct
  source 1..25: mol_type = other RNA
tcccccaggtgtacatgttcctggt

SEQ ID NO: 19802 - RNA, 25 nt, synthetic construct
  source 1..25: mol_type = other RNA
tcccccaggtctacatgtttctggt

SEQ ID NO: 19803 - RNA, 25 nt, synthetic construct
  source 1..25: mol_type = other RNA
tcccccaggtttacatgttcttagt

SEQ ID NO: 19804 - RNA, 25 nt, synthetic construct
  source 1..25: mol_type = other RNA
tcccccaggtgtacatgtttttggt

SEQ ID NO: 19805 - RNA, 25 nt, synthetic construct
  source 1..25: mol_type = other RNA
tcccccaggtttacatgtttctggt

SEQ ID NO: 19806 - RNA, 26 nt, synthetic construct
  source 1..26: mol_type = other RNA
ttcccccaggtatacatgtttttagt

SEQ ID NO: 19807 - RNA, 26 nt, synthetic construct
  source 1..26: mol_type = other RNA
ttcccccaggtatacatgttcttggt

SEQ ID NO: 19808 - RNA, 26 nt, synthetic construct
  source 1..26: mol_type = other RNA
ttcccccaggtttacatgtttttggt

SEQ ID NO: 19809 - RNA, 26 nt, synthetic construct
  source 1..26: mol_type = other RNA
ttcccccaggtatacatgttcttagt

SEQ ID NO: 19810 - RNA, 26 nt, synthetic construct
  source 1..26: mol_type = other RNA
ttcccccaggtgtacatgttcctggt

SEQ ID NO: 19811 - RNA, 26 nt, synthetic construct
  source 1..26: mol_type = other RNA
ttcccccaggtatacatgttcctggt

SEQ ID NO: 19812 - RNA, 26 nt, synthetic construct
  source 1..26: mol_type = other RNA
ttcccccaggtatacatgtttttggt

SEQ ID NO: 19813 - RNA, 26 nt, synthetic construct
  source 1..26: mol_type = other RNA
ttcccccaggtctacatgttcctggt

SEQ ID NO: 19814 - RNA, 26 nt, synthetic construct
  source 1..26: mol_type = other RNA
ttcccccaggtatacatgtttctggt

SEQ ID NO: 19815 - RNA, 26 nt, synthetic construct
  source 1..26: mol_type = other RNA
ttcccccaggtttacatgtttttagt

SEQ ID NO: 19816 - RNA, 26 nt, synthetic construct
  source 1..26: mol_type = other RNA
ttcccccaggtttacatgtttctggt

SEQ ID NO: 19817 - RNA, 26 nt, synthetic construct
  source 1..26: mol_type = other RNA
ttcccccaggtttacatgttcttggt

SEQ ID NO: 19818 - RNA, 26 nt, synthetic construct
  source 1..26: mol_type = other RNA
ttcccccaggtttacatgttcttagt

SEQ ID NO: 19819 - RNA, 26 nt, synthetic construct
  source 1..26: mol_type = other RNA
ttcccccaggtttacatgttcctggt

SEQ ID NO: 19820 - RNA, 26 nt, synthetic construct
  source 1..26: mol_type = other RNA
ttcccccaggtgtacatgtttttggt

SEQ ID NO: 19821 - RNA, 26 nt, synthetic construct
  source 1..26: mol_type = other RNA
ttcccccaggtgtacatgtttttagt

SEQ ID NO: 19822 - RNA, 26 nt, synthetic construct
  source 1..26: mol_type = other RNA
ttcccccaggtgtacatgtttctggt

SEQ ID NO: 19823 - RNA, 26 nt, synthetic construct
  source 1..26: mol_type = other RNA
ttcccccaggtgtacatgttcttagt

SEQ ID NO: 19824 - RNA, 26 nt, synthetic construct
  source 1..26: mol_type = other RNA
ttcccccaggtctacatgtttctggt

SEQ ID NO: 19825 - RNA, 26 nt, synthetic construct
  source 1..26: mol_type = other RNA
ttcccccaggtctacatgtttttggt

SEQ ID NO: 19826 - RNA, 26 nt, synthetic construct
  source 1..26: mol_type = other RNA
ttcccccaggtctacatgtttttagt

SEQ ID NO: 19827 - RNA, 26 nt, synthetic construct
  source 1..26: mol_type = other RNA
ttcccccaggtctacatgttcttggt

SEQ ID NO: 19828 - RNA, 26 nt, synthetic construct
  source 1..26: mol_type = other RNA
ttcccccaggtctacatgttcttagt

SEQ ID NO: 19829 - RNA, 26 nt, synthetic construct
  source 1..26: mol_type = other RNA
ttcccccaggtgtacatgttcttggt

SEQ ID NO: 19830 - RNA, 27 nt, synthetic construct
  source 1..27: mol_type = other RNA
tttcccccaggtatacatgtttttggt

SEQ ID NO: 19831 - RNA, 27 nt, synthetic construct
  source 1..27: mol_type = other RNA
tttcccccaggtttacatgtttttagt

SEQ ID NO: 19832 - RNA, 27 nt, synthetic construct
  source 1..27: mol_type = other RNA
tttcccccaggtgtacatgtttctggt

SEQ ID NO: 19833 - RNA, 27 nt, synthetic construct
  source 1..27: mol_type = other RNA
tttcccccaggtttacatgtttttggt

SEQ ID NO: 19834 - RNA, 27 nt, synthetic construct
  source 1..27: mol_type = other RNA
tttcccccaggtttacatgttcctggt

SEQ ID NO: 19835 - RNA, 27 nt, synthetic construct
  source 1..27: mol_type = other RNA
tttcccccaggtatacatgtttctggt

SEQ ID NO: 19836 - RNA, 27 nt, synthetic construct
  source 1..27: mol_type = other RNA
tttcccccaggtatacatgtttttagt

SEQ ID NO: 19837 - RNA, 27 nt, synthetic construct
  source 1..27: mol_type = other RNA
tttcccccaggtatacatgttcttggt

SEQ ID NO: 19838 - RNA, 27 nt, synthetic construct
  source 1..27: mol_type = other RNA
tttcccccaggtatacatgttcctggt

SEQ ID NO: 19839 - RNA, 27 nt, synthetic construct
  source 1..27: mol_type = other RNA
tttcccccaggtatacatgttcttagt

SEQ ID NO: 19840 - RNA, 27 nt, synthetic construct
  source 1..27: mol_type = other RNA
tttcccccaggtttacatgtttctggt

SEQ ID NO: 19841 - RNA, 27 nt, synthetic construct
  source 1..27: mol_type = other RNA
tttcccccaggtttacatgttcttggt

SEQ ID NO: 19842 - RNA, 27 nt, synthetic construct
  source 1..27: mol_type = other RNA
tttcccccaggtctacatgttcctggt

SEQ ID NO: 19843 - RNA, 27 nt, synthetic construct
  source 1..27: mol_type = other RNA
tttcccccaggtttacatgttcttagt

SEQ ID NO: 19844 - RNA, 27 nt, synthetic construct
  source 1..27: mol_type = other RNA
tttcccccaggtgtacatgtttttggt

SEQ ID NO: 19845 - RNA, 27 nt, synthetic construct
  source 1..27: mol_type = other RNA
tttcccccaggtgtacatgtttttagt

SEQ ID NO: 19846 - RNA, 27 nt, synthetic construct
  source 1..27: mol_type = other RNA
tttcccccaggtctacatgtttctggt

SEQ ID NO: 19847 - RNA, 27 nt, synthetic construct
  source 1..27: mol_type = other RNA
tttcccccaggtgtacatgttcttggt

SEQ ID NO: 19848 - RNA, 27 nt, synthetic construct
  source 1..27: mol_type = other RNA
tttcccccaggtgtacatgttcttagt

SEQ ID NO: 19849 - RNA, 27 nt, synthetic construct
  source 1..27: mol_type = other RNA
tttcccccaggtgtacatgttcctggt

SEQ ID NO: 19850 - RNA, 27 nt, synthetic construct
  source 1..27: mol_type = other RNA
tttcccccaggtctacatgtttttggt

SEQ ID NO: 19851 - RNA, 27 nt, synthetic construct
  source 1..27: mol_type = other RNA
tttcccccaggtctacatgttcttggt

SEQ ID NO: 19852 - RNA, 27 nt, synthetic construct
  source 1..27: mol_type = other RNA
tttcccccaggtctacatgttcttagt

SEQ ID NO: 19853 - RNA, 27 nt, synthetic construct
  source 1..27: mol_type = other RNA
tttcccccaggtctacatgtttttagt

SEQ ID NO: 19854 - RNA, 28 nt, synthetic construct
  source 1..28: mol_type = other RNA
ctttcccccaggtttacatgtttttagt

SEQ ID NO: 19855 - RNA, 28 nt, synthetic construct
  source 1..28: mol_type = other RNA
ctttcccccaggtttacatgtttttggt

SEQ ID NO: 19856 - RNA, 28 nt, synthetic construct
  source 1..28: mol_type = other RNA
ctttcccccaggtttacatgttcttagt

SEQ ID NO: 19857 - RNA, 28 nt, synthetic construct
  source 1..28: mol_type = other RNA
ctttcccccaggtgtacatgtttctggt

SEQ ID NO: 19858 - RNA, 28 nt, synthetic construct
  source 1..28: mol_type = other RNA
ctttcccccaggtctacatgtttttggt

SEQ ID NO: 19859 - RNA, 28 nt, synthetic construct
  source 1..28: mol_type = other RNA
ctttcccccaggtctacatgtttttagt

SEQ ID NO: 19860 - RNA, 28 nt, synthetic construct
  source 1..28: mol_type = other RNA
ctttcccccaggtctacatgtttctggt

SEQ ID NO: 19861 - RNA, 28 nt, synthetic construct
  source 1..28: mol_type = other RNA
ctttcccccaggtctacatgttcttagt

SEQ ID NO: 19862 - RNA, 28 nt, synthetic construct
  source 1..28: mol_type = other RNA
ctttcccccaggtctacatgttcctggt

SEQ ID NO: 19863 - RNA, 28 nt, synthetic construct
  source 1..28: mol_type = other RNA
ctttcccccaggtatacatgtttttggt

SEQ ID NO: 19864 - RNA, 28 nt, synthetic construct
  source 1..28: mol_type = other RNA
ctttcccccaggtatacatgtttttagt

SEQ ID NO: 19865 - RNA, 28 nt, synthetic construct
  source 1..28: mol_type = other RNA
ctttcccccaggtatacatgtttctggt

SEQ ID NO: 19866 - RNA, 28 nt, synthetic construct
  source 1..28: mol_type = other RNA
ctttcccccaggtgtacatgttcctggt

SEQ ID NO: 19867 - RNA, 28 nt, synthetic construct
  source 1..28: mol_type = other RNA
ctttcccccaggtatacatgttcctggt

SEQ ID NO: 19868 - RNA, 28 nt, synthetic construct
  source 1..28: mol_type = other RNA
ctttcccccaggtgtacatgttcttggt

SEQ ID NO: 19869 - RNA, 28 nt, synthetic construct
  source 1..28: mol_type = other RNA
ctttcccccaggtttacatgttcttggt

SEQ ID NO: 19870 - RNA, 28 nt, synthetic construct
  source 1..28: mol_type = other RNA
ctttcccccaggtttacatgtttctggt

SEQ ID NO: 19871 - RNA, 28 nt, synthetic construct
  source 1..28: mol_type = other RNA
ctttcccccaggtttacatgttcctggt

SEQ ID NO: 19872 - RNA, 28 nt, synthetic construct
  source 1..28: mol_type = other RNA
ctttcccccaggtatacatgttcttggt

SEQ ID NO: 19873 - RNA, 28 nt, synthetic construct
  source 1..28: mol_type = other RNA
ctttcccccaggtctacatgttcttggt

SEQ ID NO: 19874 - RNA, 28 nt, synthetic construct
  source 1..28: mol_type = other RNA
ctttcccccaggtgtacatgttcttagt

SEQ ID NO: 19875 - RNA, 28 nt, synthetic construct
  source 1..28: mol_type = other RNA
ctttcccccaggtgtacatgtttttagt

SEQ ID NO: 19876 - RNA, 28 nt, synthetic construct
  source 1..28: mol_type = other RNA
ctttcccccaggtgtacatgtttttggt

SEQ ID NO: 19877 - RNA, 28 nt, synthetic construct
  source 1..28: mol_type = other RNA
ctttcccccaggtatacatgttcttagt

SEQ ID NO: 19878 - RNA, 29 nt, synthetic construct
  source 1..29: mol_type = other RNA
gctttcccccaggtttacatgtttttggt

SEQ ID NO: 19879 - RNA, 29 nt, synthetic construct
  source 1..29: mol_type = other RNA
gctttcccccaggtctacatgttcctggt

SEQ ID NO: 19880 - RNA, 29 nt, synthetic construct
  source 1..29: mol_type = other RNA
gctttcccccaggtgtacatgtttctggt

SEQ ID NO: 19881 - RNA, 29 nt, synthetic construct
  source 1..29: mol_type = other RNA
gctttcccccaggtgtacatgttcttggt

SEQ ID NO: 19882 - RNA, 29 nt, synthetic construct
  source 1..29: mol_type = other RNA
gctttcccccaggtatacatgttcctggt

SEQ ID NO: 19883 - RNA, 29 nt, synthetic construct
  source 1..29: mol_type = other RNA
gctttcccccaggtatacatgttcttagt

SEQ ID NO: 19884 - RNA, 29 nt, synthetic construct
  source 1..29: mol_type = other RNA
gctttcccccaggtatacatgttcttggt

SEQ ID NO: 19885 - RNA, 29 nt, synthetic construct
  source 1..29: mol_type = other RNA
gctttcccccaggtatacatgtttctggt

SEQ ID NO: 19886 - RNA, 29 nt, synthetic construct
  source 1..29: mol_type = other RNA
gctttcccccaggtatacatgtttttagt

SEQ ID NO: 19887 - RNA, 29 nt, synthetic construct
  source 1..29: mol_type = other RNA
gctttcccccaggtatacatgtttttggt

SEQ ID NO: 19888 - RNA, 29 nt, synthetic construct
  source 1..29: mol_type = other RNA
gctttcccccaggtctacatgttcttagt

SEQ ID NO: 19889 - RNA, 29 nt, synthetic construct
  source 1..29: mol_type = other RNA
gctttcccccaggtttacatgtttttagt

SEQ ID NO: 19890 - RNA, 29 nt, synthetic construct
  source 1..29: mol_type = other RNA
gctttcccccaggtctacatgttcttggt

SEQ ID NO: 19891 - RNA, 29 nt, synthetic construct
  source 1..29: mol_type = other RNA
gctttcccccaggtctacatgtttctggt

SEQ ID NO: 19892 - RNA, 29 nt, synthetic construct
  source 1..29: mol_type = other RNA
gctttcccccaggtctacatgtttttagt

SEQ ID NO: 19893 - RNA, 29 nt, synthetic construct
  source 1..29: mol_type = other RNA
gctttcccccaggtctacatgtttttggt

SEQ ID NO: 19894 - RNA, 29 nt, synthetic construct
  source 1..29: mol_type = other RNA
gctttcccccaggtgtacatgtttttagt

SEQ ID NO: 19895 - RNA, 29 nt, synthetic construct
  source 1..29: mol_type = other RNA
gctttcccccaggtgtacatgtttttggt

SEQ ID NO: 19896 - RNA, 29 nt, synthetic construct
  source 1..29: mol_type = other RNA
gctttcccccaggtttacatgttcctggt

SEQ ID NO: 19897 - RNA, 29 nt, synthetic construct
  source 1..29: mol_type = other RNA
gctttcccccaggtttacatgttcttagt

SEQ ID NO: 19898 - RNA, 29 nt, synthetic construct
  source 1..29: mol_type = other RNA
gctttcccccaggtttacatgttcttggt

SEQ ID NO: 19899 - RNA, 29 nt, synthetic construct
  source 1..29: mol_type = other RNA
gctttcccccaggtttacatgtttctggt

SEQ ID NO: 19900 - RNA, 29 nt, synthetic construct
  source 1..29: mol_type = other RNA
gctttcccccaggtgtacatgttcttagt

SEQ ID NO: 19901 - RNA, 29 nt, synthetic construct
  source 1..29: mol_type = other RNA
gctttcccccaggtgtacatgttcctggt

SEQ ID NO: 19902 - RNA, 30 nt, synthetic construct
  source 1..30: mol_type = other RNA
ggctttcccccaggtttacatgtttttagt

SEQ ID NO: 19903 - RNA, 30 nt, synthetic construct
  source 1..30: mol_type = other RNA
ggctttcccccaggtatacatgttcctggt

SEQ ID NO: 19904 - RNA, 30 nt, synthetic construct
  source 1..30: mol_type = other RNA
ggctttcccccaggtctacatgtttttagt

SEQ ID NO: 19905 - RNA, 30 nt, synthetic construct
  source 1..30: mol_type = other RNA
ggctttcccccaggtatacatgttcttagt

SEQ ID NO: 19906 - RNA, 30 nt, synthetic construct
  source 1..30: mol_type = other RNA
ggctttcccccaggtatacatgttcttggt

SEQ ID NO: 19907 - RNA, 30 nt, synthetic construct
  source 1..30: mol_type = other RNA
ggctttcccccaggtatacatgtttctggt

SEQ ID NO: 19908 - RNA, 30 nt, synthetic construct
  source 1..30: mol_type = other RNA
ggctttcccccaggtatacatgtttttagt

SEQ ID NO: 19909 - RNA, 30 nt, synthetic construct
  source 1..30: mol_type = other RNA
ggctttcccccaggtatacatgtttttggt

SEQ ID NO: 19910 - RNA, 30 nt, synthetic construct
  source 1..30: mol_type = other RNA
ggctttcccccaggtctacatgttcctggt

SEQ ID NO: 19911 - RNA, 30 nt, synthetic construct
  source 1..30: mol_type = other RNA
ggctttcccccaggtctacatgttcttagt

SEQ ID NO: 19912 - RNA, 30 nt, synthetic construct
  source 1..30: mol_type = other RNA
ggctttcccccaggtctacatgttcttggt

SEQ ID NO: 19913 - RNA, 30 nt, synthetic construct
  source 1..30: mol_type = other RNA
ggctttcccccaggtttacatgtttttggt

SEQ ID NO: 19914 - RNA, 30 nt, synthetic construct
  source 1..30: mol_type = other RNA
ggctttcccccaggtgtacatgttcctggt

SEQ ID NO: 19915 - RNA, 30 nt, synthetic construct
  source 1..30: mol_type = other RNA
ggctttcccccaggtttacatgtttctggt

SEQ ID NO: 19916 - RNA, 30 nt, synthetic construct
  source 1..30: mol_type = other RNA
ggctttcccccaggtgtacatgttcttggt

SEQ ID NO: 19917 - RNA, 30 nt, synthetic construct
  source 1..30: mol_type = other RNA
ggctttcccccaggtttacatgttcttggt

SEQ ID NO: 19918 - RNA, 30 nt, synthetic construct
  source 1..30: mol_type = other RNA
ggctttcccccaggtctacatgtttttggt

SEQ ID NO: 19919 - RNA, 30 nt, synthetic construct
  source 1..30: mol_type = other RNA
ggctttcccccaggtgtacatgttcttagt

SEQ ID NO: 19920 - RNA, 30 nt, synthetic construct
  source 1..30: mol_type = other RNA
ggctttcccccaggtgtacatgtttctggt

SEQ ID NO: 19921 - RNA, 30 nt, synthetic construct
  source 1..30: mol_type = other RNA
ggctttcccccaggtctacatgtttctggt

SEQ ID NO: 19922 - RNA, 30 nt, synthetic construct
  source 1..30: mol_type = other RNA
ggctttcccccaggtttacatgttcttagt

SEQ ID NO: 19923 - RNA, 30 nt, synthetic construct
  source 1..30: mol_type = other RNA
ggctttcccccaggtttacatgttcctggt

SEQ ID NO: 19924 - RNA, 30 nt, synthetic construct
  source 1..30: mol_type = other RNA
ggctttcccccaggtgtacatgtttttggt

SEQ ID NO: 19925 - RNA, 30 nt, synthetic construct
  source 1..30: mol_type = other RNA
ggctttcccccaggtgtacatgtttttagt

SEQ ID NO: 19926 - RNA, 31 nt, synthetic construct
  source 1..31: mol_type = other RNA
tggctttcccccaggtatacatgtttttggt

SEQ ID NO: 19927 - RNA, 31 nt, synthetic construct
  source 1..31: mol_type = other RNA
tggctttcccccaggtatacatgttcttggt

SEQ ID NO: 19928 - RNA, 31 nt, synthetic construct
  source 1..31: mol_type = other RNA
tggctttcccccaggtatacatgtttttagt

SEQ ID NO: 19929 - RNA, 31 nt, synthetic construct
  source 1..31: mol_type = other RNA
tggctttcccccaggtatacatgtttctggt

SEQ ID NO: 19930 - RNA, 31 nt, synthetic construct
  source 1..31: mol_type = other RNA
tggctttcccccaggtgtacatgttcctggt

SEQ ID NO: 19931 - RNA, 31 nt, synthetic construct
  source 1..31: mol_type = other RNA
tggctttcccccaggtctacatgttcttagt

SEQ ID NO: 19932 - RNA, 31 nt, synthetic construct
  source 1..31: mol_type = other RNA
tggctttcccccaggtctacatgttcttggt

SEQ ID NO: 19933 - RNA, 31 nt, synthetic construct
  source 1..31: mol_type = other RNA
tggctttcccccaggtatacatgttcttagt

SEQ ID NO: 19934 - RNA, 31 nt, synthetic construct
  source 1..31: mol_type = other RNA
tggctttcccccaggtatacatgttcctggt

SEQ ID NO: 19935 - RNA, 31 nt, synthetic construct
  source 1..31: mol_type = other RNA
tggctttcccccaggtctacatgtttttggt

SEQ ID NO: 19936 - RNA, 31 nt, synthetic construct
  source 1..31: mol_type = other RNA
tggctttcccccaggtgtacatgttcttggt

SEQ ID NO: 19937 - RNA, 31 nt, synthetic construct
  source 1..31: mol_type = other RNA
tggctttcccccaggtgtacatgtttctggt

SEQ ID NO: 19938 - RNA, 31 nt, synthetic construct
  source 1..31: mol_type = other RNA
tggctttcccccaggtgtacatgtttttagt

SEQ ID NO: 19939 - RNA, 31 nt, synthetic construct
  source 1..31: mol_type = other RNA
tggctttcccccaggtgtacatgtttttggt

SEQ ID NO: 19940 - RNA, 31 nt, synthetic construct
  source 1..31: mol_type = other RNA
tggctttcccccaggtttacatgtttttagt

SEQ ID NO: 19941 - RNA, 31 nt, synthetic construct
  source 1..31: mol_type = other RNA
tggctttcccccaggtttacatgttcttagt

SEQ ID NO: 19942 - RNA, 31 nt, synthetic construct
  source 1..31: mol_type = other RNA
tggctttcccccaggtttacatgtttctggt

SEQ ID NO: 19943 - RNA, 31 nt, synthetic construct
  source 1..31: mol_type = other RNA
tggctttcccccaggtttacatgtttttggt

SEQ ID NO: 19944 - RNA, 31 nt, synthetic construct
  source 1..31: mol_type = other RNA
tggctttcccccaggtttacatgttcctggt

SEQ ID NO: 19945 - RNA, 31 nt, synthetic construct
  source 1..31: mol_type = other RNA
tggctttcccccaggtgtacatgttcttagt

SEQ ID NO: 19946 - RNA, 31 nt, synthetic construct
  source 1..31: mol_type = other RNA
tggctttcccccaggtttacatgttcttggt

SEQ ID NO: 19947 - RNA, 31 nt, synthetic construct
  source 1..31: mol_type = other RNA
tggctttcccccaggtctacatgtttttagt

SEQ ID NO: 19948 - RNA, 31 nt, synthetic construct
  source 1..31: mol_type = other RNA
tggctttcccccaggtctacatgttcctggt

SEQ ID NO: 19949 - RNA, 31 nt, synthetic construct
  source 1..31: mol_type = other RNA
tggctttcccccaggtctacatgtttctggt

SEQ ID NO: 19950 - RNA, 32 nt, synthetic construct
  source 1..32: mol_type = other RNA
ctggctttcccccaggtctacatgtttttagt

SEQ ID NO: 19951 - RNA, 32 nt, synthetic construct
  source 1..32: mol_type = other RNA
ctggctttcccccaggtttacatgttcttggt

SEQ ID NO: 19952 - RNA, 32 nt, synthetic construct
  source 1..32: mol_type = other RNA
ctggctttcccccaggtttacatgttcttagt

SEQ ID NO: 19953 - RNA, 32 nt, synthetic construct
  source 1..32: mol_type = other RNA
ctggctttcccccaggtgtacatgtttttggt

SEQ ID NO: 19954 - RNA, 32 nt, synthetic construct
  source 1..32: mol_type = other RNA
ctggctttcccccaggtttacatgttcctggt

SEQ ID NO: 19955 - RNA, 32 nt, synthetic construct
  source 1..32: mol_type = other RNA
ctggctttcccccaggtgtacatgtttctggt

SEQ ID NO: 19956 - RNA, 32 nt, synthetic construct
  source 1..32: mol_type = other RNA
ctggctttcccccaggtgtacatgttcttggt

SEQ ID NO: 19957 - RNA, 32 nt, synthetic construct
  source 1..32: mol_type = other RNA
ctggctttcccccaggtgtacatgttcttagt

SEQ ID NO: 19958 - RNA, 32 nt, synthetic construct
  source 1..32: mol_type = other RNA
ctggctttcccccaggtgtacatgttcctggt

SEQ ID NO: 19959 - RNA, 32 nt, synthetic construct
  source 1..32: mol_type = other RNA
ctggctttcccccaggtctacatgtttttggt

SEQ ID NO: 19960 - RNA, 32 nt, synthetic construct
  source 1..32: mol_type = other RNA
ctggctttcccccaggtgtacatgtttttagt

SEQ ID NO: 19961 - RNA, 32 nt, synthetic construct
  source 1..32: mol_type = other RNA
ctggctttcccccaggtatacatgttcttggt

SEQ ID NO: 19962 - RNA, 32 nt, synthetic construct
  source 1..32: mol_type = other RNA
ctggctttcccccaggtttacatgtttctggt

SEQ ID NO: 19963 - RNA, 32 nt, synthetic construct
  source 1..32: mol_type = other RNA
ctggctttcccccaggtttacatgtttttggt

SEQ ID NO: 19964 - RNA, 32 nt, synthetic construct
  source 1..32: mol_type = other RNA
ctggctttcccccaggtctacatgttcttggt

SEQ ID NO: 19965 - RNA, 32 nt, synthetic construct
  source 1..32: mol_type = other RNA
ctggctttcccccaggtctacatgtttctggt

SEQ ID NO: 19966 - RNA, 32 nt, synthetic construct
  source 1..32: mol_type = other RNA
ctggctttcccccaggtttacatgtttttagt

SEQ ID NO: 19967 - RNA, 32 nt, synthetic construct
  source 1..32: mol_type = other RNA
ctggctttcccccaggtatacatgtttttggt

SEQ ID NO: 19968 - RNA, 32 nt, synthetic construct
  source 1..32: mol_type = other RNA
ctggctttcccccaggtatacatgttcctggt

SEQ ID NO: 19969 - RNA, 32 nt, synthetic construct
  source 1..32: mol_type = other RNA
ctggctttcccccaggtatacatgttcttagt

SEQ ID NO: 19970 - RNA, 32 nt, synthetic construct
  source 1..32: mol_type = other RNA
ctggctttcccccaggtatacatgtttctggt

SEQ ID NO: 19971 - RNA, 32 nt, synthetic construct
  source 1..32: mol_type = other RNA
ctggctttcccccaggtatacatgtttttagt

SEQ ID NO: 19972 - RNA, 32 nt, synthetic construct
  source 1..32: mol_type = other RNA
ctggctttcccccaggtctacatgttcctggt

SEQ ID NO: 19973 - RNA, 32 nt, synthetic construct
  source 1..32: mol_type = other RNA
ctggctttcccccaggtctacatgttcttagt

SEQ ID NO: 19974 - RNA, 33 nt, synthetic construct
  source 1..33: mol_type = other RNA
tctggctttcccccaggtttacatgttcttggt

SEQ ID NO: 19975 - RNA, 33 nt, synthetic construct
  source 1..33: mol_type = other RNA
tctggctttcccccaggtgtacatgttcttggt

SEQ ID NO: 19976 - RNA, 33 nt, synthetic construct
  source 1..33: mol_type = other RNA
tctggctttcccccaggtttacatgtttctggt

SEQ ID NO: 19977 - RNA, 33 nt, synthetic construct
  source 1..33: mol_type = other RNA
tctggctttcccccaggtttacatgtttttagt

SEQ ID NO: 19978 - RNA, 33 nt, synthetic construct
  source 1..33: mol_type = other RNA
tctggctttcccccaggtttacatgtttttggt

SEQ ID NO: 19979 - RNA, 33 nt, synthetic construct
  source 1..33: mol_type = other RNA
tctggctttcccccaggtttacatgttcttagt

SEQ ID NO: 19980 - RNA, 33 nt, synthetic construct
  source 1..33: mol_type = other RNA
tctggctttcccccaggtctacatgtttctggt

SEQ ID NO: 19981 - RNA, 33 nt, synthetic construct
  source 1..33: mol_type = other RNA
tctggctttcccccaggtatacatgtttttggt

SEQ ID NO: 19982 - RNA, 33 nt, synthetic construct
  source 1..33: mol_type = other RNA
tctggctttcccccaggtctacatgtttttggt

SEQ ID NO: 19983 - RNA, 33 nt, synthetic construct
  source 1..33: mol_type = other RNA
tctggctttcccccaggtctacatgtttttagt

SEQ ID NO: 19984 - RNA, 33 nt, synthetic construct
  source 1..33: mol_type = other RNA
tctggctttcccccaggtctacatgttcttggt

SEQ ID NO: 19985 - RNA, 33 nt, synthetic construct
  source 1..33: mol_type = other RNA
tctggctttcccccaggtctacatgttcttagt

SEQ ID NO: 19986 - RNA, 33 nt, synthetic construct
  source 1..33: mol_type = other RNA
tctggctttcccccaggtctacatgttcctggt

SEQ ID NO: 19987 - RNA, 33 nt, synthetic construct
  source 1..33: mol_type = other RNA
tctggctttcccccaggtatacatgtttttagt

SEQ ID NO: 19988 - RNA, 33 nt, synthetic construct
  source 1..33: mol_type = other RNA
tctggctttcccccaggtatacatgtttctggt

SEQ ID NO: 19989 - RNA, 33 nt, synthetic construct
  source 1..33: mol_type = other RNA
tctggctttcccccaggtatacatgttcttggt

SEQ ID NO: 19990 - RNA, 33 nt, synthetic construct
  source 1..33: mol_type = other RNA
tctggctttcccccaggtatacatgttcttagt

SEQ ID NO: 19991 - RNA, 33 nt, synthetic construct
  source 1..33: mol_type = other RNA
tctggctttcccccaggtgtacatgtttctggt

SEQ ID NO: 19992 - RNA, 33 nt, synthetic construct
  source 1..33: mol_type = other RNA
tctggctttcccccaggtatacatgttcctggt

SEQ ID NO: 19993 - RNA, 33 nt, synthetic construct
  source 1..33: mol_type = other RNA
tctggctttcccccaggtttacatgttcctggt

SEQ ID NO: 19994 - RNA, 33 nt, synthetic construct
  source 1..33: mol_type = other RNA
tctggctttcccccaggtgtacatgtttttggt

SEQ ID NO: 19995 - RNA, 33 nt, synthetic construct
  source 1..33: mol_type = other RNA
tctggctttcccccaggtgtacatgtttttagt

SEQ ID NO: 19996 - RNA, 33 nt, synthetic construct
  source 1..33: mol_type = other RNA
tctggctttcccccaggtgtacatgttcttagt

SEQ ID NO: 19997 - RNA, 33 nt, synthetic construct
  source 1..33: mol_type = other RNA
tctggctttcccccaggtgtacatgttcctggt

SEQ ID NO: 19998 - RNA, 34 nt, synthetic construct
  source 1..34: mol_type = other RNA
ctctggctttcccccaggtgtacatgttcttagt

SEQ ID NO: 19999 - RNA, 34 nt, synthetic construct
  source 1..34: mol_type = other RNA
ctctggctttcccccaggtgtacatgttcttggt

SEQ ID NO: 20000 - RNA, 34 nt, synthetic construct
  source 1..34: mol_type = other RNA
ctctggctttcccccaggtatacatgttcctggt

SEQ ID NO: 20001 - RNA, 34 nt, synthetic construct
  source 1..34: mol_type = other RNA
ctctggctttcccccaggtgtacatgtttctggt

SEQ ID NO: 20002 - RNA, 34 nt, synthetic construct
  source 1..34: mol_type = other RNA
ctctggctttcccccaggtgtacatgtttttagt

SEQ ID NO: 20003 - RNA, 34 nt, synthetic construct
  source 1..34: mol_type = other RNA
ctctggctttcccccaggtgtacatgtttttggt

SEQ ID NO: 20004 - RNA, 34 nt, synthetic construct
  source 1..34: mol_type = other RNA
ctctggctttcccccaggtgtacatgttcctggt

SEQ ID NO: 20005 - RNA, 34 nt, synthetic construct
  source 1..34: mol_type = other RNA
ctctggctttcccccaggtttacatgttcttagt

SEQ ID NO: 20006 - RNA, 34 nt, synthetic construct
  source 1..34: mol_type = other RNA
ctctggctttcccccaggtttacatgttcttggt

SEQ ID NO: 20007 - RNA, 34 nt, synthetic construct
  source 1..34: mol_type = other RNA
ctctggctttcccccaggtttacatgtttctggt

SEQ ID NO: 20008 - RNA, 34 nt, synthetic construct
  source 1..34: mol_type = other RNA
ctctggctttcccccaggtttacatgtttttggt

SEQ ID NO: 20009 - RNA, 34 nt, synthetic construct
  source 1..34: mol_type = other RNA
ctctggctttcccccaggtctacatgtttttggt

SEQ ID NO: 20010 - RNA, 34 nt, synthetic construct
  source 1..34: mol_type = other RNA
ctctggctttcccccaggtctacatgttcttggt

SEQ ID NO: 20011 - RNA, 34 nt, synthetic construct
  source 1..34: mol_type = other RNA
ctctggctttcccccaggtctacatgttcttagt

SEQ ID NO: 20012 - RNA, 34 nt, synthetic construct
  source 1..34: mol_type = other RNA
ctctggctttcccccaggtctacatgttcctggt

SEQ ID NO: 20013 - RNA, 34 nt, synthetic construct
  source 1..34: mol_type = other RNA
ctctggctttcccccaggtatacatgtttttagt

SEQ ID NO: 20014 - RNA, 34 nt, synthetic construct
  source 1..34: mol_type = other RNA
ctctggctttcccccaggtatacatgtttctggt

SEQ ID NO: 20015 - RNA, 34 nt, synthetic construct
  source 1..34: mol_type = other RNA
ctctggctttcccccaggtatacatgttcttggt

SEQ ID NO: 20016 - RNA, 34 nt, synthetic construct
  source 1..34: mol_type = other RNA
ctctggctttcccccaggtatacatgttcttagt

SEQ ID NO: 20017 - RNA, 34 nt, synthetic construct
  source 1..34: mol_type = other RNA
ctctggctttcccccaggtctacatgtttttagt

SEQ ID NO: 20018 - RNA, 34 nt, synthetic construct
  source 1..34: mol_type = other RNA
ctctggctttcccccaggtttacatgttcctggt

SEQ ID NO: 20019 - RNA, 34 nt, synthetic construct
  source 1..34: mol_type = other RNA
ctctggctttcccccaggtatacatgtttttggt

SEQ ID NO: 20020 - RNA, 34 nt, synthetic construct
  source 1..34: mol_type = other RNA
ctctggctttcccccaggtttacatgtttttagt

SEQ ID NO: 20021 - RNA, 34 nt, synthetic construct
  source 1..34: mol_type = other RNA
ctctggctttcccccaggtctacatgtttctggt

SEQ ID NO: 20022 - RNA, 35 nt, synthetic construct
  source 1..35: mol_type = other RNA
actctggctttcccccaggtgtacatgttcttggt

SEQ ID NO: 20023 - RNA, 35 nt, synthetic construct
  source 1..35: mol_type = other RNA
actctggctttcccccaggtgtacatgtttctggt

SEQ ID NO: 20024 - RNA, 35 nt, synthetic construct
  source 1..35: mol_type = other RNA
actctggctttcccccaggtgtacatgtttttggt

SEQ ID NO: 20025 - RNA, 35 nt, synthetic construct
  source 1..35: mol_type = other RNA
actctggctttcccccaggtttacatgttcttagt

SEQ ID NO: 20026 - RNA, 35 nt, synthetic construct
  source 1..35: mol_type = other RNA
actctggctttcccccaggtttacatgttcctggt

SEQ ID NO: 20027 - RNA, 35 nt, synthetic construct
  source 1..35: mol_type = other RNA
actctggctttcccccaggtttacatgtttctggt

SEQ ID NO: 20028 - RNA, 35 nt, synthetic construct
  source 1..35: mol_type = other RNA
actctggctttcccccaggtttacatgtttttagt

SEQ ID NO: 20029 - RNA, 35 nt, synthetic construct
  source 1..35: mol_type = other RNA
actctggctttcccccaggtttacatgtttttggt

SEQ ID NO: 20030 - RNA, 35 nt, synthetic construct
  source 1..35: mol_type = other RNA
actctggctttcccccaggtgtacatgtttttagt

SEQ ID NO: 20031 - RNA, 35 nt, synthetic construct
  source 1..35: mol_type = other RNA
actctggctttcccccaggtctacatgtttttggt

SEQ ID NO: 20032 - RNA, 35 nt, synthetic construct
  source 1..35: mol_type = other RNA
actctggctttcccccaggtgtacatgttcttagt

SEQ ID NO: 20033 - RNA, 35 nt, synthetic construct
  source 1..35: mol_type = other RNA
actctggctttcccccaggtttacatgttcttggt

SEQ ID NO: 20034 - RNA, 35 nt, synthetic construct
  source 1..35: mol_type = other RNA
actctggctttcccccaggtgtacatgttcctggt

SEQ ID NO: 20035 - RNA, 35 nt, synthetic construct
  source 1..35: mol_type = other RNA
actctggctttcccccaggtatacatgttcttggt

SEQ ID NO: 20036 - RNA, 35 nt, synthetic construct
  source 1..35: mol_type = other RNA
actctggctttcccccaggtctacatgtttctggt

SEQ ID NO: 20037 - RNA, 35 nt, synthetic construct
  source 1..35: mol_type = other RNA
actctggctttcccccaggtctacatgtttttagt

SEQ ID NO: 20038 - RNA, 35 nt, synthetic construct
  source 1..35: mol_type = other RNA
actctggctttcccccaggtatacatgttcctggt

SEQ ID NO: 20039 - RNA, 35 nt, synthetic construct
  source 1..35: mol_type = other RNA
actctggctttcccccaggtatacatgttcttagt

SEQ ID NO: 20040 - RNA, 35 nt, synthetic construct
  source 1..35: mol_type = other RNA
actctggctttcccccaggtatacatgtttttggt

SEQ ID NO: 20041 - RNA, 35 nt, synthetic construct
  source 1..35: mol_type = other RNA
actctggctttcccccaggtatacatgtttctggt

SEQ ID NO: 20042 - RNA, 35 nt, synthetic construct
  source 1..35: mol_type = other RNA
actctggctttcccccaggtctacatgttcctggt

SEQ ID NO: 20043 - RNA, 35 nt, synthetic construct
  source 1..35: mol_type = other RNA
actctggctttcccccaggtctacatgttcttagt

SEQ ID NO: 20044 - RNA, 35 nt, synthetic construct
  source 1..35: mol_type = other RNA
actctggctttcccccaggtctacatgttcttggt

SEQ ID NO: 20045 - RNA, 35 nt, synthetic construct
  source 1..35: mol_type = other RNA
actctggctttcccccaggtatacatgtttttagt

SEQ ID NO: 20046 - RNA, 36 nt, synthetic construct
  source 1..36: mol_type = other RNA
gactctggctttcccccaggtctacatgtttttagt

SEQ ID NO: 20047 - RNA, 36 nt, synthetic construct
  source 1..36: mol_type = other RNA
gactctggctttcccccaggtatacatgttcttagt

SEQ ID NO: 20048 - RNA, 36 nt, synthetic construct
  source 1..36: mol_type = other RNA
gactctggctttcccccaggtatacatgttcttggt

SEQ ID NO: 20049 - RNA, 36 nt, synthetic construct
  source 1..36: mol_type = other RNA
gactctggctttcccccaggtatacatgtttctggt

SEQ ID NO: 20050 - RNA, 36 nt, synthetic construct
  source 1..36: mol_type = other RNA
gactctggctttcccccaggtatacatgtttttagt

SEQ ID NO: 20051 - RNA, 36 nt, synthetic construct
  source 1..36: mol_type = other RNA
gactctggctttcccccaggtatacatgttcctggt

SEQ ID NO: 20052 - RNA, 36 nt, synthetic construct
  source 1..36: mol_type = other RNA
gactctggctttcccccaggtctacatgttcctggt

SEQ ID NO: 20053 - RNA, 36 nt, synthetic construct
  source 1..36: mol_type = other RNA
gactctggctttcccccaggtctacatgttcttagt

SEQ ID NO: 20054 - RNA, 36 nt, synthetic construct
  source 1..36: mol_type = other RNA
gactctggctttcccccaggtatacatgtttttggt

SEQ ID NO: 20055 - RNA, 36 nt, synthetic construct
  source 1..36: mol_type = other RNA
gactctggctttcccccaggtctacatgtttctggt

SEQ ID NO: 20056 - RNA, 36 nt, synthetic construct
  source 1..36: mol_type = other RNA
gactctggctttcccccaggtgtacatgttcttagt

SEQ ID NO: 20057 - RNA, 36 nt, synthetic construct
  source 1..36: mol_type = other RNA
gactctggctttcccccaggtttacatgttcttggt

SEQ ID NO: 20058 - RNA, 36 nt, synthetic construct
  source 1..36: mol_type = other RNA
gactctggctttcccccaggtctacatgtttttggt

SEQ ID NO: 20059 - RNA, 36 nt, synthetic construct
  source 1..36: mol_type = other RNA
gactctggctttcccccaggtttacatgttcctggt

SEQ ID NO: 20060 - RNA, 36 nt, synthetic construct
  source 1..36: mol_type = other RNA
gactctggctttcccccaggtgtacatgttcttggt

SEQ ID NO: 20061 - RNA, 36 nt, synthetic construct
  source 1..36: mol_type = other RNA
gactctggctttcccccaggtgtacatgtttctggt

SEQ ID NO: 20062 - RNA, 36 nt, synthetic construct
  source 1..36: mol_type = other RNA
gactctggctttcccccaggtttacatgttcttagt

SEQ ID NO: 20063 - RNA, 36 nt, synthetic construct
  source 1..36: mol_type = other RNA
gactctggctttcccccaggtgtacatgtttttagt

SEQ ID NO: 20064 - RNA, 36 nt, synthetic construct
  source 1..36: mol_type = other RNA
gactctggctttcccccaggtttacatgtttctggt

SEQ ID NO: 20065 - RNA, 36 nt, synthetic construct
  source 1..36: mol_type = other RNA
gactctggctttcccccaggtttacatgtttttagt

SEQ ID NO: 20066 - RNA, 36 nt, synthetic construct
  source 1..36: mol_type = other RNA
gactctggctttcccccaggtttacatgtttttggt

SEQ ID NO: 20067 - RNA, 36 nt, synthetic construct
  source 1..36: mol_type = other RNA
gactctggctttcccccaggtgtacatgttcctggt

SEQ ID NO: 20068 - RNA, 36 nt, synthetic construct
  source 1..36: mol_type = other RNA
gactctggctttcccccaggtgtacatgtttttggt

SEQ ID NO: 20069 - RNA, 36 nt, synthetic construct
  source 1..36: mol_type = other RNA
gactctggctttcccccaggtctacatgttcttggt

SEQ ID NO: 20070 - RNA, 37 nt, synthetic construct
  source 1..37: mol_type = other RNA
cgactctggctttcccccaggtctacatgttcttggt

SEQ ID NO: 20071 - RNA, 37 nt, synthetic construct
  source 1..37: mol_type = other RNA
cgactctggctttcccccaggtctacatgtttctggt

SEQ ID NO: 20072 - RNA, 37 nt, synthetic construct
  source 1..37: mol_type = other RNA
cgactctggctttcccccaggtctacatgtttttggt

SEQ ID NO: 20073 - RNA, 37 nt, synthetic construct
  source 1..37: mol_type = other RNA
cgactctggctttcccccaggtctacatgtttttagt

SEQ ID NO: 20074 - RNA, 37 nt, synthetic construct
  source 1..37: mol_type = other RNA
cgactctggctttcccccaggtctacatgttcttagt

SEQ ID NO: 20075 - RNA, 37 nt, synthetic construct
  source 1..37: mol_type = other RNA
cgactctggctttcccccaggtttacatgttcctggt

SEQ ID NO: 20076 - RNA, 37 nt, synthetic construct
  source 1..37: mol_type = other RNA
cgactctggctttcccccaggtgtacatgttcctggt

SEQ ID NO: 20077 - RNA, 37 nt, synthetic construct
  source 1..37: mol_type = other RNA
cgactctggctttcccccaggtgtacatgttcttagt

SEQ ID NO: 20078 - RNA, 37 nt, synthetic construct
  source 1..37: mol_type = other RNA
cgactctggctttcccccaggtttacatgtttctggt

SEQ ID NO: 20079 - RNA, 37 nt, synthetic construct
  source 1..37: mol_type = other RNA
cgactctggctttcccccaggtttacatgttcttggt

SEQ ID NO: 20080 - RNA, 37 nt, synthetic construct
  source 1..37: mol_type = other RNA
cgactctggctttcccccaggtttacatgttcttagt

SEQ ID NO: 20081 - RNA, 37 nt, synthetic construct
  source 1..37: mol_type = other RNA
cgactctggctttcccccaggtttacatgtttttagt

SEQ ID NO: 20082 - RNA, 37 nt, synthetic construct
  source 1..37: mol_type = other RNA
cgactctggctttcccccaggtgtacatgtttttggt

SEQ ID NO: 20083 - RNA, 37 nt, synthetic construct
  source 1..37: mol_type = other RNA
cgactctggctttcccccaggtgtacatgtttttagt

SEQ ID NO: 20084 - RNA, 37 nt, synthetic construct
  source 1..37: mol_type = other RNA
cgactctggctttcccccaggtgtacatgtttctggt

SEQ ID NO: 20085 - RNA, 37 nt, synthetic construct
  source 1..37: mol_type = other RNA
cgactctggctttcccccaggtttacatgtttttggt

SEQ ID NO: 20086 - RNA, 37 nt, synthetic construct
  source 1..37: mol_type = other RNA
cgactctggctttcccccaggtgtacatgttcttggt

SEQ ID NO: 20087 - RNA, 37 nt, synthetic construct
  source 1..37: mol_type = other RNA
cgactctggctttcccccaggtctacatgttcctggt

SEQ ID NO: 20088 - RNA, 37 nt, synthetic construct
  source 1..37: mol_type = other RNA
cgactctggctttcccccaggtatacatgtttttggt

SEQ ID NO: 20089 - RNA, 37 nt, synthetic construct
  source 1..37: mol_type = other RNA
cgactctggctttcccccaggtatacatgtttctggt

SEQ ID NO: 20090 - RNA, 37 nt, synthetic construct
  source 1..37: mol_type = other RNA
cgactctggctttcccccaggtatacatgtttttagt

SEQ ID NO: 20091 - RNA, 37 nt, synthetic construct
  source 1..37: mol_type = other RNA
cgactctggctttcccccaggtatacatgttcctggt

SEQ ID NO: 20092 - RNA, 37 nt, synthetic construct
  source 1..37: mol_type = other RNA
cgactctggctttcccccaggtatacatgttcttagt

SEQ ID NO: 20093 - RNA, 37 nt, synthetic construct
  source 1..37: mol_type = other RNA
cgactctggctttcccccaggtatacatgttcttggt

SEQ ID NO: 20094 - RNA, 38 nt, synthetic construct
  source 1..38: mol_type = other RNA
ccgactctggctttcccccaggtctacatgtttctggt

SEQ ID NO: 20095 - RNA, 38 nt, synthetic construct
  source 1..38: mol_type = other RNA
ccgactctggctttcccccaggtctacatgtttttggt

SEQ ID NO: 20096 - RNA, 38 nt, synthetic construct
  source 1..38: mol_type = other RNA
ccgactctggctttcccccaggtatacatgttcctggt

SEQ ID NO: 20097 - RNA, 38 nt, synthetic construct
  source 1..38: mol_type = other RNA
ccgactctggctttcccccaggtatacatgttcttagt

SEQ ID NO: 20098 - RNA, 38 nt, synthetic construct
  source 1..38: mol_type = other RNA
ccgactctggctttcccccaggtatacatgttcttggt

SEQ ID NO: 20099 - RNA, 38 nt, synthetic construct
  source 1..38: mol_type = other RNA
ccgactctggctttcccccaggtctacatgttcctggt

SEQ ID NO: 20100 - RNA, 38 nt, synthetic construct
  source 1..38: mol_type = other RNA
ccgactctggctttcccccaggtatacatgtttttagt

SEQ ID NO: 20101 - RNA, 38 nt, synthetic construct
  source 1..38: mol_type = other RNA
ccgactctggctttcccccaggtctacatgttcttagt

SEQ ID NO: 20102 - RNA, 38 nt, synthetic construct
  source 1..38: mol_type = other RNA
ccgactctggctttcccccaggtatacatgtttttggt

SEQ ID NO: 20103 - RNA, 38 nt, synthetic construct
  source 1..38: mol_type = other RNA
ccgactctggctttcccccaggtctacatgtttttagt

SEQ ID NO: 20104 - RNA, 38 nt, synthetic construct
  source 1..38: mol_type = other RNA
ccgactctggctttcccccaggtctacatgttcttggt

SEQ ID NO: 20105 - RNA, 38 nt, synthetic construct
  source 1..38: mol_type = other RNA
ccgactctggctttcccccaggtatacatgtttctggt

SEQ ID NO: 20106 - RNA, 38 nt, synthetic construct
  source 1..38: mol_type = other RNA
ccgactctggctttcccccaggtgtacatgtttttggt

SEQ ID NO: 20107 - RNA, 38 nt, synthetic construct
  source 1..38: mol_type = other RNA
ccgactctggctttcccccaggtgtacatgttcttggt

SEQ ID NO: 20108 - RNA, 38 nt, synthetic construct
  source 1..38: mol_type = other RNA
ccgactctggctttcccccaggtttacatgtttctggt

SEQ ID NO: 20109 - RNA, 38 nt, synthetic construct
  source 1..38: mol_type = other RNA
ccgactctggctttcccccaggtgtacatgtttctggt

SEQ ID NO: 20110 - RNA, 38 nt, synthetic construct
  source 1..38: mol_type = other RNA
ccgactctggctttcccccaggtgtacatgttcttagt

SEQ ID NO: 20111 - RNA, 38 nt, synthetic construct
  source 1..38: mol_type = other RNA
ccgactctggctttcccccaggtgtacatgttcctggt

SEQ ID NO: 20112 - RNA, 38 nt, synthetic construct
  source 1..38: mol_type = other RNA
ccgactctggctttcccccaggtttacatgtttttagt

SEQ ID NO: 20113 - RNA, 38 nt, synthetic construct
  source 1..38: mol_type = other RNA
ccgactctggctttcccccaggtttacatgtttttggt

SEQ ID NO: 20114 - RNA, 38 nt, synthetic construct
  source 1..38: mol_type = other RNA
ccgactctggctttcccccaggtttacatgttcttggt

SEQ ID NO: 20115 - RNA, 38 nt, synthetic construct
  source 1..38: mol_type = other RNA
ccgactctggctttcccccaggtttacatgttcttagt

SEQ ID NO: 20116 - RNA, 38 nt, synthetic construct
  source 1..38: mol_type = other RNA
ccgactctggctttcccccaggtttacatgttcctggt

SEQ ID NO: 20117 - RNA, 38 nt, synthetic construct
  source 1..38: mol_type = other RNA
ccgactctggctttcccccaggtgtacatgtttttagt

SEQ ID NO: 20118 - RNA, 39 nt, synthetic construct
  source 1..39: mol_type = other RNA
cccgactctggctttcccccaggtatacatgttcttggt

SEQ ID NO: 20119 - RNA, 39 nt, synthetic construct
  source 1..39: mol_type = other RNA
cccgactctggctttcccccaggtatacatgttcttagt

SEQ ID NO: 20120 - RNA, 39 nt, synthetic construct
  source 1..39: mol_type = other RNA
cccgactctggctttcccccaggtctacatgtttttggt

SEQ ID NO: 20121 - RNA, 39 nt, synthetic construct
  source 1..39: mol_type = other RNA
cccgactctggctttcccccaggtctacatgtttttagt

SEQ ID NO: 20122 - RNA, 39 nt, synthetic construct
  source 1..39: mol_type = other RNA
cccgactctggctttcccccaggtatacatgttcctggt

SEQ ID NO: 20123 - RNA, 39 nt, synthetic construct
  source 1..39: mol_type = other RNA
cccgactctggctttcccccaggtatacatgtttttggt

SEQ ID NO: 20124 - RNA, 39 nt, synthetic construct
  source 1..39: mol_type = other RNA
cccgactctggctttcccccaggtctacatgtttctggt

SEQ ID NO: 20125 - RNA, 39 nt, synthetic construct
  source 1..39: mol_type = other RNA
cccgactctggctttcccccaggtctacatgttcttggt

SEQ ID NO: 20126 - RNA, 39 nt, synthetic construct
  source 1..39: mol_type = other RNA
cccgactctggctttcccccaggtctacatgttcttagt

SEQ ID NO: 20127 - RNA, 39 nt, synthetic construct
  source 1..39: mol_type = other RNA
cccgactctggctttcccccaggtctacatgttcctggt

SEQ ID NO: 20128 - RNA, 39 nt, synthetic construct
  source 1..39: mol_type = other RNA
cccgactctggctttcccccaggtttacatgtttttagt

SEQ ID NO: 20129 - RNA, 39 nt, synthetic construct
  source 1..39: mol_type = other RNA
cccgactctggctttcccccaggtgtacatgttcttagt

SEQ ID NO: 20130 - RNA, 39 nt, synthetic construct
  source 1..39: mol_type = other RNA
cccgactctggctttcccccaggtatacatgtttctggt

SEQ ID NO: 20131 - RNA, 39 nt, synthetic construct
  source 1..39: mol_type = other RNA
cccgactctggctttcccccaggtgtacatgttcttggt

SEQ ID NO: 20132 - RNA, 39 nt, synthetic construct
  source 1..39: mol_type = other RNA
cccgactctggctttcccccaggtgtacatgtttctggt

SEQ ID NO: 20133 - RNA, 39 nt, synthetic construct
  source 1..39: mol_type = other RNA
cccgactctggctttcccccaggtgtacatgtttttagt

SEQ ID NO: 20134 - RNA, 39 nt, synthetic construct
  source 1..39: mol_type = other RNA
cccgactctggctttcccccaggtgtacatgtttttggt

SEQ ID NO: 20135 - RNA, 39 nt, synthetic construct
  source 1..39: mol_type = other RNA
cccgactctggctttcccccaggtttacatgttcttagt

SEQ ID NO: 20136 - RNA, 39 nt, synthetic construct
  source 1..39: mol_type = other RNA
cccgactctggctttcccccaggtttacatgttcttggt

SEQ ID NO: 20137 - RNA, 39 nt, synthetic construct
  source 1..39: mol_type = other RNA
cccgactctggctttcccccaggtttacatgtttctggt

SEQ ID NO: 20138 - RNA, 39 nt, synthetic construct
  source 1..39: mol_type = other RNA
cccgactctggctttcccccaggtttacatgttcctggt

SEQ ID NO: 20139 - RNA, 39 nt, synthetic construct
  source 1..39: mol_type = other RNA
cccgactctggctttcccccaggtgtacatgttcctggt

SEQ ID NO: 20140 - RNA, 39 nt, synthetic construct
  source 1..39: mol_type = other RNA
cccgactctggctttcccccaggtttacatgtttttggt

SEQ ID NO: 20141 - RNA, 39 nt, synthetic construct
  source 1..39: mol_type = other RNA
cccgactctggctttcccccaggtatacatgtttttagt

SEQ ID NO: 20142 - RNA, 40 nt, synthetic construct
  source 1..40: mol_type = other RNA
ccccgactctggctttcccccaggtgtacatgtttttagt

SEQ ID NO: 20143 - RNA, 40 nt, synthetic construct
  source 1..40: mol_type = other RNA
ccccgactctggctttcccccaggtctacatgttcttggt

SEQ ID NO: 20144 - RNA, 40 nt, synthetic construct
  source 1..40: mol_type = other RNA
ccccgactctggctttcccccaggtttacatgtttctggt

SEQ ID NO: 20145 - RNA, 40 nt, synthetic construct
  source 1..40: mol_type = other RNA
ccccgactctggctttcccccaggtttacatgttcttggt

SEQ ID NO: 20146 - RNA, 40 nt, synthetic construct
  source 1..40: mol_type = other RNA
ccccgactctggctttcccccaggtttacatgttcttagt

SEQ ID NO: 20147 - RNA, 40 nt, synthetic construct
  source 1..40: mol_type = other RNA
ccccgactctggctttcccccaggtttacatgttcctggt

SEQ ID NO: 20148 - RNA, 40 nt, synthetic construct
  source 1..40: mol_type = other RNA
ccccgactctggctttcccccaggtgtacatgtttttggt

SEQ ID NO: 20149 - RNA, 40 nt, synthetic construct
  source 1..40: mol_type = other RNA
ccccgactctggctttcccccaggtgtacatgtttctggt

SEQ ID NO: 20150 - RNA, 40 nt, synthetic construct
  source 1..40: mol_type = other RNA
ccccgactctggctttcccccaggtgtacatgttcttggt

SEQ ID NO: 20151 - RNA, 40 nt, synthetic construct
  source 1..40: mol_type = other RNA
ccccgactctggctttcccccaggtgtacatgttcttagt

SEQ ID NO: 20152 - RNA, 40 nt, synthetic construct
  source 1..40: mol_type = other RNA
ccccgactctggctttcccccaggtgtacatgttcctggt

SEQ ID NO: 20153 - RNA, 40 nt, synthetic construct
  source 1..40: mol_type = other RNA
ccccgactctggctttcccccaggtctacatgtttctggt

SEQ ID NO: 20154 - RNA, 40 nt, synthetic construct
  source 1..40: mol_type = other RNA
ccccgactctggctttcccccaggtctacatgtttttagt

SEQ ID NO: 20155 - RNA, 40 nt, synthetic construct
  source 1..40: mol_type = other RNA
ccccgactctggctttcccccaggtctacatgttcttagt

SEQ ID NO: 20156 - RNA, 40 nt, synthetic construct
  source 1..40: mol_type = other RNA
ccccgactctggctttcccccaggtatacatgttcttggt

SEQ ID NO: 20157 - RNA, 40 nt, synthetic construct
  source 1..40: mol_type = other RNA
ccccgactctggctttcccccaggtttacatgtttttagt

SEQ ID NO: 20158 - RNA, 40 nt, synthetic construct
  source 1..40: mol_type = other RNA
ccccgactctggctttcccccaggtctacatgtttttggt

SEQ ID NO: 20159 - RNA, 40 nt, synthetic construct
  source 1..40: mol_type = other RNA
ccccgactctggctttcccccaggtatacatgttcctggt

SEQ ID NO: 20160 - RNA, 40 nt, synthetic construct
  source 1..40: mol_type = other RNA
ccccgactctggctttcccccaggtttacatgtttttggt

SEQ ID NO: 20161 - RNA, 40 nt, synthetic construct
  source 1..40: mol_type = other RNA
ccccgactctggctttcccccaggtatacatgttcttagt

SEQ ID NO: 20162 - RNA, 40 nt, synthetic construct
  source 1..40: mol_type = other RNA
ccccgactctggctttcccccaggtatacatgtttctggt

SEQ ID NO: 20163 - RNA, 40 nt, synthetic construct
  source 1..40: mol_type = other RNA
ccccgactctggctttcccccaggtatacatgtttttagt

SEQ ID NO: 20164 - RNA, 40 nt, synthetic construct
  source 1..40: mol_type = other RNA
ccccgactctggctttcccccaggtatacatgtttttggt

SEQ ID NO: 20165 - RNA, 40 nt, synthetic construct
  source 1..40: mol_type = other RNA
ccccgactctggctttcccccaggtctacatgttcctggt

SEQ ID NO: 20166 - RNA, 41 nt, synthetic construct
  source 1..41: mol_type = other RNA
cccccgactctggctttcccccaggtctacatgtttctggt

SEQ ID NO: 20167 - RNA, 41 nt, synthetic construct
  source 1..41: mol_type = other RNA
cccccgactctggctttcccccaggtctacatgtttttagt

SEQ ID NO: 20168 - RNA, 41 nt, synthetic construct
  source 1..41: mol_type = other RNA
cccccgactctggctttcccccaggtatacatgtttttagt

SEQ ID NO: 20169 - RNA, 41 nt, synthetic construct
  source 1..41: mol_type = other RNA
cccccgactctggctttcccccaggtatacatgttcttagt

SEQ ID NO: 20170 - RNA, 41 nt, synthetic construct
  source 1..41: mol_type = other RNA
cccccgactctggctttcccccaggtatacatgttcctggt

SEQ ID NO: 20171 - RNA, 41 nt, synthetic construct
  source 1..41: mol_type = other RNA
cccccgactctggctttcccccaggtgtacatgtttctggt

SEQ ID NO: 20172 - RNA, 41 nt, synthetic construct
  source 1..41: mol_type = other RNA
cccccgactctggctttcccccaggtgtacatgtttttggt

SEQ ID NO: 20173 - RNA, 41 nt, synthetic construct
  source 1..41: mol_type = other RNA
cccccgactctggctttcccccaggtttacatgttcctggt

SEQ ID NO: 20174 - RNA, 41 nt, synthetic construct
  source 1..41: mol_type = other RNA
cccccgactctggctttcccccaggtttacatgttcttagt

SEQ ID NO: 20175 - RNA, 41 nt, synthetic construct
  source 1..41: mol_type = other RNA
cccccgactctggctttcccccaggtttacatgttcttggt

SEQ ID NO: 20176 - RNA, 41 nt, synthetic construct
  source 1..41: mol_type = other RNA
cccccgactctggctttcccccaggtttacatgtttctggt

SEQ ID NO: 20177 - RNA, 41 nt, synthetic construct
  source 1..41: mol_type = other RNA
cccccgactctggctttcccccaggtttacatgtttttagt

SEQ ID NO: 20178 - RNA, 41 nt, synthetic construct
  source 1..41: mol_type = other RNA
cccccgactctggctttcccccaggtgtacatgtttttagt

SEQ ID NO: 20179 - RNA, 41 nt, synthetic construct
  source 1..41: mol_type = other RNA
cccccgactctggctttcccccaggtttacatgtttttggt

SEQ ID NO: 20180 - RNA, 41 nt, synthetic construct
  source 1..41: mol_type = other RNA
cccccgactctggctttcccccaggtctacatgttcttggt

SEQ ID NO: 20181 - RNA, 41 nt, synthetic construct
  source 1..41: mol_type = other RNA
cccccgactctggctttcccccaggtctacatgttcttagt

SEQ ID NO: 20182 - RNA, 41 nt, synthetic construct
  source 1..41: mol_type = other RNA
cccccgactctggctttcccccaggtatacatgtttttggt

SEQ ID NO: 20183 - RNA, 41 nt, synthetic construct
  source 1..41: mol_type = other RNA
cccccgactctggctttcccccaggtgtacatgttcttagt

SEQ ID NO: 20184 - RNA, 41 nt, synthetic construct
  source 1..41: mol_type = other RNA
cccccgactctggctttcccccaggtctacatgtttttggt

SEQ ID NO: 20185 - RNA, 41 nt, synthetic construct
  source 1..41: mol_type = other RNA
cccccgactctggctttcccccaggtgtacatgttcctggt

SEQ ID NO: 20186 - RNA, 41 nt, synthetic construct
  source 1..41: mol_type = other RNA
cccccgactctggctttcccccaggtatacatgttcttggt

SEQ ID NO: 20187 - RNA, 41 nt, synthetic construct
  source 1..41: mol_type = other RNA
cccccgactctggctttcccccaggtatacatgtttctggt

SEQ ID NO: 20188 - RNA, 41 nt, synthetic construct
  source 1..41: mol_type = other RNA
cccccgactctggctttcccccaggtctacatgttcctggt

SEQ ID NO: 20189 - RNA, 41 nt, synthetic construct
  source 1..41: mol_type = other RNA
cccccgactctggctttcccccaggtgtacatgttcttggt

SEQ ID NO: 20190 - RNA, 42 nt, synthetic construct
  source 1..42: mol_type = other RNA
tcccccgactctggctttcccccaggtttacatgtttttggt

SEQ ID NO: 20191 - RNA, 42 nt, synthetic construct
  source 1..42: mol_type = other RNA
tcccccgactctggctttcccccaggtttacatgtttttagt

SEQ ID NO: 20192 - RNA, 42 nt, synthetic construct
  source 1..42: mol_type = other RNA
tcccccgactctggctttcccccaggtttacatgtttctggt

SEQ ID NO: 20193 - RNA, 42 nt, synthetic construct
  source 1..42: mol_type = other RNA
tcccccgactctggctttcccccaggtttacatgttcttggt

SEQ ID NO: 20194 - RNA, 42 nt, synthetic construct
  source 1..42: mol_type = other RNA
tcccccgactctggctttcccccaggtttacatgttcttagt

SEQ ID NO: 20195 - RNA, 42 nt, synthetic construct
  source 1..42: mol_type = other RNA
tcccccgactctggctttcccccaggtttacatgttcctggt

SEQ ID NO: 20196 - RNA, 42 nt, synthetic construct
  source 1..42: mol_type = other RNA
tcccccgactctggctttcccccaggtgtacatgtttttagt

SEQ ID NO: 20197 - RNA, 42 nt, synthetic construct
  source 1..42: mol_type = other RNA
tcccccgactctggctttcccccaggtgtacatgtttctggt

SEQ ID NO: 20198 - RNA, 42 nt, synthetic construct
  source 1..42: mol_type = other RNA
tcccccgactctggctttcccccaggtgtacatgttcttggt

SEQ ID NO: 20199 - RNA, 42 nt, synthetic construct
  source 1..42: mol_type = other RNA
tcccccgactctggctttcccccaggtctacatgtttttagt

SEQ ID NO: 20200 - RNA, 42 nt, synthetic construct
  source 1..42: mol_type = other RNA
tcccccgactctggctttcccccaggtgtacatgttcttagt

SEQ ID NO: 20201 - RNA, 42 nt, synthetic construct
  source 1..42: mol_type = other RNA
tcccccgactctggctttcccccaggtctacatgtttctggt

SEQ ID NO: 20202 - RNA, 42 nt, synthetic construct
  source 1..42: mol_type = other RNA
tcccccgactctggctttcccccaggtctacatgttcttggt

SEQ ID NO: 20203 - RNA, 42 nt, synthetic construct
  source 1..42: mol_type = other RNA
tcccccgactctggctttcccccaggtctacatgttcttagt

SEQ ID NO: 20204 - RNA, 42 nt, synthetic construct
  source 1..42: mol_type = other RNA
tcccccgactctggctttcccccaggtatacatgtttttggt

SEQ ID NO: 20205 - RNA, 42 nt, synthetic construct
  source 1..42: mol_type = other RNA
tcccccgactctggctttcccccaggtatacatgtttttagt

SEQ ID NO: 20206 - RNA, 42 nt, synthetic construct
  source 1..42: mol_type = other RNA
tcccccgactctggctttcccccaggtatacatgtttctggt

SEQ ID NO: 20207 - RNA, 42 nt, synthetic construct
  source 1..42: mol_type = other RNA
tcccccgactctggctttcccccaggtatacatgttcttagt

SEQ ID NO: 20208 - RNA, 42 nt, synthetic construct
  source 1..42: mol_type = other RNA
tcccccgactctggctttcccccaggtatacatgttcctggt

SEQ ID NO: 20209 - RNA, 42 nt, synthetic construct
  source 1..42: mol_type = other RNA
tcccccgactctggctttcccccaggtctacatgtttttggt

SEQ ID NO: 20210 - RNA, 42 nt, synthetic construct
  source 1..42: mol_type = other RNA
tcccccgactctggctttcccccaggtctacatgttcctggt

SEQ ID NO: 20211 - RNA, 42 nt, synthetic construct
  source 1..42: mol_type = other RNA
tcccccgactctggctttcccccaggtatacatgttcttggt

SEQ ID NO: 20212 - RNA, 42 nt, synthetic construct
  source 1..42: mol_type = other RNA
tcccccgactctggctttcccccaggtgtacatgtttttggt

SEQ ID NO: 20213 - RNA, 42 nt, synthetic construct
  source 1..42: mol_type = other RNA
tcccccgactctggctttcccccaggtgtacatgttcctggt

SEQ ID NO: 20214 - RNA, 43 nt, synthetic construct
  source 1..43: mol_type = other RNA
gtcccccgactctggctttcccccaggtctacatgttcttggt

SEQ ID NO: 20215 - RNA, 43 nt, synthetic construct
  source 1..43: mol_type = other RNA
gtcccccgactctggctttcccccaggtgtacatgttcttagt

SEQ ID NO: 20216 - RNA, 43 nt, synthetic construct
  source 1..43: mol_type = other RNA
gtcccccgactctggctttcccccaggtttacatgtttttagt

SEQ ID NO: 20217 - RNA, 43 nt, synthetic construct
  source 1..43: mol_type = other RNA
gtcccccgactctggctttcccccaggtttacatgtttctggt

SEQ ID NO: 20218 - RNA, 43 nt, synthetic construct
  source 1..43: mol_type = other RNA
gtcccccgactctggctttcccccaggtttacatgttcttggt

SEQ ID NO: 20219 - RNA, 43 nt, synthetic construct
  source 1..43: mol_type = other RNA
gtcccccgactctggctttcccccaggtatacatgtttttggt

SEQ ID NO: 20220 - RNA, 43 nt, synthetic construct
  source 1..43: mol_type = other RNA
gtcccccgactctggctttcccccaggtgtacatgtttttggt

SEQ ID NO: 20221 - RNA, 43 nt, synthetic construct
  source 1..43: mol_type = other RNA
gtcccccgactctggctttcccccaggtttacatgttcctggt

SEQ ID NO: 20222 - RNA, 43 nt, synthetic construct
  source 1..43: mol_type = other RNA
gtcccccgactctggctttcccccaggtgtacatgtttttagt

SEQ ID NO: 20223 - RNA, 43 nt, synthetic construct
  source 1..43: mol_type = other RNA
gtcccccgactctggctttcccccaggtgtacatgtttctggt

SEQ ID NO: 20224 - RNA, 43 nt, synthetic construct
  source 1..43: mol_type = other RNA
gtcccccgactctggctttcccccaggtgtacatgttcttggt

SEQ ID NO: 20225 - RNA, 43 nt, synthetic construct
  source 1..43: mol_type = other RNA
gtcccccgactctggctttcccccaggtttacatgtttttggt

SEQ ID NO: 20226 - RNA, 43 nt, synthetic construct
  source 1..43: mol_type = other RNA
gtcccccgactctggctttcccccaggtctacatgttcttagt

SEQ ID NO: 20227 - RNA, 43 nt, synthetic construct
  source 1..43: mol_type = other RNA
gtcccccgactctggctttcccccaggtttacatgttcttagt

SEQ ID NO: 20228 - RNA, 43 nt, synthetic construct
  source 1..43: mol_type = other RNA
gtcccccgactctggctttcccccaggtatacatgtttttagt

SEQ ID NO: 20229 - RNA, 43 nt, synthetic construct
  source 1..43: mol_type = other RNA
gtcccccgactctggctttcccccaggtgtacatgttcctggt

SEQ ID NO: 20230 - RNA, 43 nt, synthetic construct
  source 1..43: mol_type = other RNA
gtcccccgactctggctttcccccaggtctacatgtttttggt

SEQ ID NO: 20231 - RNA, 43 nt, synthetic construct
  source 1..43: mol_type = other RNA
gtcccccgactctggctttcccccaggtatacatgttcctggt

SEQ ID NO: 20232 - RNA, 43 nt, synthetic construct
  source 1..43: mol_type = other RNA
gtcccccgactctggctttcccccaggtatacatgtttctggt

SEQ ID NO: 20233 - RNA, 43 nt, synthetic construct
  source 1..43: mol_type = other RNA
gtcccccgactctggctttcccccaggtatacatgttcttggt

SEQ ID NO: 20234 - RNA, 43 nt, synthetic construct
  source 1..43: mol_type = other RNA
gtcccccgactctggctttcccccaggtctacatgttcctggt

SEQ ID NO: 20235 - RNA, 43 nt, synthetic construct
  source 1..43: mol_type = other RNA
gtcccccgactctggctttcccccaggtctacatgtttctggt

SEQ ID NO: 20236 - RNA, 43 nt, synthetic construct
  source 1..43: mol_type = other RNA
gtcccccgactctggctttcccccaggtctacatgtttttagt

SEQ ID NO: 20237 - RNA, 43 nt, synthetic construct
  source 1..43: mol_type = other RNA
gtcccccgactctggctttcccccaggtatacatgttcttagt

SEQ ID NO: 20238 - RNA, 44 nt, synthetic construct
  source 1..44: mol_type = other RNA
ggtcccccgactctggctttcccccaggtatacatgtttttagt

SEQ ID NO: 20239 - RNA, 44 nt, synthetic construct
  source 1..44: mol_type = other RNA
ggtcccccgactctggctttcccccaggtatacatgttcttagt

SEQ ID NO: 20240 - RNA, 44 nt, synthetic construct
  source 1..44: mol_type = other RNA
ggtcccccgactctggctttcccccaggtatacatgttcttggt

SEQ ID NO: 20241 - RNA, 44 nt, synthetic construct
  source 1..44: mol_type = other RNA
ggtcccccgactctggctttcccccaggtatacatgttcctggt

SEQ ID NO: 20242 - RNA, 44 nt, synthetic construct
  source 1..44: mol_type = other RNA
ggtcccccgactctggctttcccccaggtatacatgtttttggt

SEQ ID NO: 20243 - RNA, 44 nt, synthetic construct
  source 1..44: mol_type = other RNA
ggtcccccgactctggctttcccccaggtctacatgtttttagt

SEQ ID NO: 20244 - RNA, 44 nt, synthetic construct
  source 1..44: mol_type = other RNA
ggtcccccgactctggctttcccccaggtttacatgtttttggt

SEQ ID NO: 20245 - RNA, 44 nt, synthetic construct
  source 1..44: mol_type = other RNA
ggtcccccgactctggctttcccccaggtatacatgtttctggt

SEQ ID NO: 20246 - RNA, 44 nt, synthetic construct
  source 1..44: mol_type = other RNA
ggtcccccgactctggctttcccccaggtttacatgtttttagt

SEQ ID NO: 20247 - RNA, 44 nt, synthetic construct
  source 1..44: mol_type = other RNA
ggtcccccgactctggctttcccccaggtgtacatgttcttggt

SEQ ID NO: 20248 - RNA, 44 nt, synthetic construct
  source 1..44: mol_type = other RNA
ggtcccccgactctggctttcccccaggtttacatgttcttggt

SEQ ID NO: 20249 - RNA, 44 nt, synthetic construct
  source 1..44: mol_type = other RNA
ggtcccccgactctggctttcccccaggtgtacatgtttctggt

SEQ ID NO: 20250 - RNA, 44 nt, synthetic construct
  source 1..44: mol_type = other RNA
ggtcccccgactctggctttcccccaggtctacatgttcctggt

SEQ ID NO: 20251 - RNA, 44 nt, synthetic construct
  source 1..44: mol_type = other RNA
ggtcccccgactctggctttcccccaggtctacatgttcttagt

SEQ ID NO: 20252 - RNA, 44 nt, synthetic construct
  source 1..44: mol_type = other RNA
ggtcccccgactctggctttcccccaggtctacatgttcttggt

SEQ ID NO: 20253 - RNA, 44 nt, synthetic construct
  source 1..44: mol_type = other RNA
ggtcccccgactctggctttcccccaggtttacatgttcctggt

SEQ ID NO: 20254 - RNA, 44 nt, synthetic construct
  source 1..44: mol_type = other RNA
ggtcccccgactctggctttcccccaggtgtacatgtttttagt

SEQ ID NO: 20255 - RNA, 44 nt, synthetic construct
  source 1..44: mol_type = other RNA
ggtcccccgactctggctttcccccaggtctacatgtttctggt

SEQ ID NO: 20256 - RNA, 44 nt, synthetic construct
  source 1..44: mol_type = other RNA
ggtcccccgactctggctttcccccaggtgtacatgtttttggt

SEQ ID NO: 20257 - RNA, 44 nt, synthetic construct
  source 1..44: mol_type = other RNA
ggtcccccgactctggctttcccccaggtttacatgtttctggt

SEQ ID NO: 20258 - RNA, 44 nt, synthetic construct
  source 1..44: mol_type = other RNA
ggtcccccgactctggctttcccccaggtttacatgttcttagt

SEQ ID NO: 20259 - RNA, 44 nt, synthetic construct
  source 1..44: mol_type = other RNA
ggtcccccgactctggctttcccccaggtgtacatgttcttagt

SEQ ID NO: 20260 - RNA, 44 nt, synthetic construct
  source 1..44: mol_type = other RNA
ggtcccccgactctggctttcccccaggtgtacatgttcctggt

SEQ ID NO: 20261 - RNA, 44 nt, synthetic construct
  source 1..44: mol_type = other RNA
ggtcccccgactctggctttcccccaggtctacatgtttttggt

SEQ ID NO: 20262 - RNA, 45 nt, synthetic construct
  source 1..45: mol_type = other RNA
gggtcccccgactctggctttcccccaggtttacatgtttttagt

SEQ ID NO: 20263 - RNA, 45 nt, synthetic construct
  source 1..45: mol_type = other RNA
gggtcccccgactctggctttcccccaggtgtacatgtttttagt

SEQ ID NO: 20264 - RNA, 45 nt, synthetic construct
  source 1..45: mol_type = other RNA
gggtcccccgactctggctttcccccaggtgtacatgtttctggt

SEQ ID NO: 20265 - RNA, 45 nt, synthetic construct
  source 1..45: mol_type = other RNA
gggtcccccgactctggctttcccccaggtgtacatgttcttggt

SEQ ID NO: 20266 - RNA, 45 nt, synthetic construct
  source 1..45: mol_type = other RNA
gggtcccccgactctggctttcccccaggtgtacatgttcttagt

SEQ ID NO: 20267 - RNA, 45 nt, synthetic construct
  source 1..45: mol_type = other RNA
gggtcccccgactctggctttcccccaggtttacatgttcctggt

SEQ ID NO: 20268 - RNA, 45 nt, synthetic construct
  source 1..45: mol_type = other RNA
gggtcccccgactctggctttcccccaggtgtacatgtttttggt

SEQ ID NO: 20269 - RNA, 45 nt, synthetic construct
  source 1..45: mol_type = other RNA
gggtcccccgactctggctttcccccaggtgtacatgttcctggt

SEQ ID NO: 20270 - RNA, 45 nt, synthetic construct
  source 1..45: mol_type = other RNA
gggtcccccgactctggctttcccccaggtctacatgttcttagt

SEQ ID NO: 20271 - RNA, 45 nt, synthetic construct
  source 1..45: mol_type = other RNA
gggtcccccgactctggctttcccccaggtctacatgtttttggt

SEQ ID NO: 20272 - RNA, 45 nt, synthetic construct
  source 1..45: mol_type = other RNA
gggtcccccgactctggctttcccccaggtctacatgtttctggt

SEQ ID NO: 20273 - RNA, 45 nt, synthetic construct
  source 1..45: mol_type = other RNA
gggtcccccgactctggctttcccccaggtctacatgttcttggt

SEQ ID NO: 20274 - RNA, 45 nt, synthetic construct
  source 1..45: mol_type = other RNA
gggtcccccgactctggctttcccccaggtctacatgttcctggt

SEQ ID NO: 20275 - RNA, 45 nt, synthetic construct
  source 1..45: mol_type = other RNA
gggtcccccgactctggctttcccccaggtatacatgtttttggt

SEQ ID NO: 20276 - RNA, 45 nt, synthetic construct
  source 1..45: mol_type = other RNA
gggtcccccgactctggctttcccccaggtatacatgtttttagt

SEQ ID NO: 20277 - RNA, 45 nt, synthetic construct
  source 1..45: mol_type = other RNA
gggtcccccgactctggctttcccccaggtatacatgttcttggt

SEQ ID NO: 20278 - RNA, 45 nt, synthetic construct
  source 1..45: mol_type = other RNA
gggtcccccgactctggctttcccccaggtatacatgttcttagt

SEQ ID NO: 20279 - RNA, 45 nt, synthetic construct
  source 1..45: mol_type = other RNA
gggtcccccgactctggctttcccccaggtatacatgttcctggt

SEQ ID NO: 20280 - RNA, 45 nt, synthetic construct
  source 1..45: mol_type = other RNA
gggtcccccgactctggctttcccccaggtatacatgtttctggt

SEQ ID NO: 20281 - RNA, 45 nt, synthetic construct
  source 1..45: mol_type = other RNA
gggtcccccgactctggctttcccccaggtttacatgttcttggt

SEQ ID NO: 20282 - RNA, 45 nt, synthetic construct
  source 1..45: mol_type = other RNA
gggtcccccgactctggctttcccccaggtttacatgtttctggt

SEQ ID NO: 20283 - RNA, 45 nt, synthetic construct
  source 1..45: mol_type = other RNA
gggtcccccgactctggctttcccccaggtttacatgtttttggt

SEQ ID NO: 20284 - RNA, 45 nt, synthetic construct
  source 1..45: mol_type = other RNA
gggtcccccgactctggctttcccccaggtttacatgttcttagt

SEQ ID NO: 20285 - RNA, 45 nt, synthetic construct
  source 1..45: mol_type = other RNA
gggtcccccgactctggctttcccccaggtctacatgtttttagt

SEQ ID NO: 20286 - RNA, 46 nt, synthetic construct
  source 1..46: mol_type = other RNA
ggggtcccccgactctggctttcccccaggtgtacatgtttctggt

SEQ ID NO: 20287 - RNA, 46 nt, synthetic construct
  source 1..46: mol_type = other RNA
ggggtcccccgactctggctttcccccaggtttacatgtttttggt

SEQ ID NO: 20288 - RNA, 46 nt, synthetic construct
  source 1..46: mol_type = other RNA
ggggtcccccgactctggctttcccccaggtgtacatgttcttggt

SEQ ID NO: 20289 - RNA, 46 nt, synthetic construct
  source 1..46: mol_type = other RNA
ggggtcccccgactctggctttcccccaggtgtacatgtttttagt

SEQ ID NO: 20290 - RNA, 46 nt, synthetic construct
  source 1..46: mol_type = other RNA
ggggtcccccgactctggctttcccccaggtgtacatgttcttagt

SEQ ID NO: 20291 - RNA, 46 nt, synthetic construct
  source 1..46: mol_type = other RNA
ggggtcccccgactctggctttcccccaggtttacatgttcctggt

SEQ ID NO: 20292 - RNA, 46 nt, synthetic construct
  source 1..46: mol_type = other RNA
ggggtcccccgactctggctttcccccaggtttacatgttcttagt

SEQ ID NO: 20293 - RNA, 46 nt, synthetic construct
  source 1..46: mol_type = other RNA
ggggtcccccgactctggctttcccccaggtgtacatgttcctggt

SEQ ID NO: 20294 - RNA, 46 nt, synthetic construct
  source 1..46: mol_type = other RNA
ggggtcccccgactctggctttcccccaggtctacatgttcttagt

SEQ ID NO: 20295 - RNA, 46 nt, synthetic construct
  source 1..46: mol_type = other RNA
ggggtcccccgactctggctttcccccaggtttacatgttcttggt

SEQ ID NO: 20296 - RNA, 46 nt, synthetic construct
  source 1..46: mol_type = other RNA
ggggtcccccgactctggctttcccccaggtctacatgttcttggt

SEQ ID NO: 20297 - RNA, 46 nt, synthetic construct
  source 1..46: mol_type = other RNA
ggggtcccccgactctggctttcccccaggtctacatgtttttggt

SEQ ID NO: 20298 - RNA, 46 nt, synthetic construct
  source 1..46: mol_type = other RNA
ggggtcccccgactctggctttcccccaggtgtacatgtttttggt

SEQ ID NO: 20299 - RNA, 46 nt, synthetic construct
  source 1..46: mol_type = other RNA
ggggtcccccgactctggctttcccccaggtctacatgtttctggt

SEQ ID NO: 20300 - RNA, 46 nt, synthetic construct
  source 1..46: mol_type = other RNA
ggggtcccccgactctggctttcccccaggtatacatgtttttagt

SEQ ID NO: 20301 - RNA, 46 nt, synthetic construct
  source 1..46: mol_type = other RNA
ggggtcccccgactctggctttcccccaggtatacatgttcttggt

SEQ ID NO: 20302 - RNA, 46 nt, synthetic construct
  source 1..46: mol_type = other RNA
ggggtcccccgactctggctttcccccaggtatacatgttcttagt

SEQ ID NO: 20303 - RNA, 46 nt, synthetic construct
  source 1..46: mol_type = other RNA
ggggtcccccgactctggctttcccccaggtatacatgttcctggt

SEQ ID NO: 20304 - RNA, 46 nt, synthetic construct
  source 1..46: mol_type = other RNA
ggggtcccccgactctggctttcccccaggtttacatgtttctggt

SEQ ID NO: 20305 - RNA, 46 nt, synthetic construct
  source 1..46: mol_type = other RNA
ggggtcccccgactctggctttcccccaggtatacatgtttttggt

SEQ ID NO: 20306 - RNA, 46 nt, synthetic construct
  source 1..46: mol_type = other RNA
ggggtcccccgactctggctttcccccaggtctacatgtttttagt

SEQ ID NO: 20307 - RNA, 46 nt, synthetic construct
  source 1..46: mol_type = other RNA
ggggtcccccgactctggctttcccccaggtttacatgtttttagt

SEQ ID NO: 20308 - RNA, 46 nt, synthetic construct
  source 1..46: mol_type = other RNA
ggggtcccccgactctggctttcccccaggtctacatgttcctggt

SEQ ID NO: 20309 - RNA, 46 nt, synthetic construct
  source 1..46: mol_type = other RNA
ggggtcccccgactctggctttcccccaggtatacatgtttctggt

SEQ ID NO: 20310 - RNA, 47 nt, synthetic construct
  source 1..47: mol_type = other RNA
tggggtcccccgactctggctttcccccaggtttacatgttcttagt

SEQ ID NO: 20311 - RNA, 47 nt, synthetic construct
  source 1..47: mol_type = other RNA
tggggtcccccgactctggctttcccccaggtttacatgttcttggt

SEQ ID NO: 20312 - RNA, 47 nt, synthetic construct
  source 1..47: mol_type = other RNA
tggggtcccccgactctggctttcccccaggtttacatgttcctggt

SEQ ID NO: 20313 - RNA, 47 nt, synthetic construct
  source 1..47: mol_type = other RNA
tggggtcccccgactctggctttcccccaggtttacatgtttttggt

SEQ ID NO: 20314 - RNA, 47 nt, synthetic construct
  source 1..47: mol_type = other RNA
tggggtcccccgactctggctttcccccaggtttacatgtttttagt

SEQ ID NO: 20315 - RNA, 47 nt, synthetic construct
  source 1..47: mol_type = other RNA
tggggtcccccgactctggctttcccccaggtgtacatgtttttggt

SEQ ID NO: 20316 - RNA, 47 nt, synthetic construct
  source 1..47: mol_type = other RNA
tggggtcccccgactctggctttcccccaggtgtacatgtttttagt

SEQ ID NO: 20317 - RNA, 47 nt, synthetic construct
  source 1..47: mol_type = other RNA
tggggtcccccgactctggctttcccccaggtgtacatgttcttggt

SEQ ID NO: 20318 - RNA, 47 nt, synthetic construct
  source 1..47: mol_type = other RNA
tggggtcccccgactctggctttcccccaggtatacatgtttttggt

SEQ ID NO: 20319 - RNA, 47 nt, synthetic construct
  source 1..47: mol_type = other RNA
tggggtcccccgactctggctttcccccaggtctacatgtttctggt

SEQ ID NO: 20320 - RNA, 47 nt, synthetic construct
  source 1..47: mol_type = other RNA
tggggtcccccgactctggctttcccccaggtctacatgttcttggt

SEQ ID NO: 20321 - RNA, 47 nt, synthetic construct
  source 1..47: mol_type = other RNA
tggggtcccccgactctggctttcccccaggtctacatgttcttagt

SEQ ID NO: 20322 - RNA, 47 nt, synthetic construct
  source 1..47: mol_type = other RNA
tggggtcccccgactctggctttcccccaggtctacatgttcctggt

SEQ ID NO: 20323 - RNA, 47 nt, synthetic construct
  source 1..47: mol_type = other RNA
tggggtcccccgactctggctttcccccaggtatacatgtttttagt

SEQ ID NO: 20324 - RNA, 47 nt, synthetic construct
  source 1..47: mol_type = other RNA
tggggtcccccgactctggctttcccccaggtatacatgtttctggt

SEQ ID NO: 20325 - RNA, 47 nt, synthetic construct
  source 1..47: mol_type = other RNA
tggggtcccccgactctggctttcccccaggtatacatgttcttggt

SEQ ID NO: 20326 - RNA, 47 nt, synthetic construct
  source 1..47: mol_type = other RNA
tggggtcccccgactctggctttcccccaggtttacatgtttctggt

SEQ ID NO: 20327 - RNA, 47 nt, synthetic construct
  source 1..47: mol_type = other RNA
tggggtcccccgactctggctttcccccaggtgtacatgtttctggt

SEQ ID NO: 20328 - RNA, 47 nt, synthetic construct
  source 1..47: mol_type = other RNA
tggggtcccccgactctggctttcccccaggtctacatgtttttggt

SEQ ID NO: 20329 - RNA, 47 nt, synthetic construct
  source 1..47: mol_type = other RNA
tggggtcccccgactctggctttcccccaggtatacatgttcctggt

SEQ ID NO: 20330 - RNA, 47 nt, synthetic construct
  source 1..47: mol_type = other RNA
tggggtcccccgactctggctttcccccaggtgtacatgttcctggt

SEQ ID NO: 20331 - RNA, 47 nt, synthetic construct
  source 1..47: mol_type = other RNA
tggggtcccccgactctggctttcccccaggtgtacatgttcttagt

SEQ ID NO: 20332 - RNA, 47 nt, synthetic construct
  source 1..47: mol_type = other RNA
tggggtcccccgactctggctttcccccaggtatacatgttcttagt

SEQ ID NO: 20333 - RNA, 47 nt, synthetic construct
  source 1..47: mol_type = other RNA
tggggtcccccgactctggctttcccccaggtctacatgtttttagt

SEQ ID NO: 20334 - RNA, 48 nt, synthetic construct
  source 1..48: mol_type = other RNA
atggggtcccccgactctggctttcccccaggtgtacatgttcttagt

SEQ ID NO: 20335 - RNA, 48 nt, synthetic construct
  source 1..48: mol_type = other RNA
atggggtcccccgactctggctttcccccaggtgtacatgttcttggt

SEQ ID NO: 20336 - RNA, 48 nt, synthetic construct
  source 1..48: mol_type = other RNA
atggggtcccccgactctggctttcccccaggtttacatgtttttagt

SEQ ID NO: 20337 - RNA, 48 nt, synthetic construct
  source 1..48: mol_type = other RNA
atggggtcccccgactctggctttcccccaggtttacatgtttctggt

SEQ ID NO: 20338 - RNA, 48 nt, synthetic construct
  source 1..48: mol_type = other RNA
atggggtcccccgactctggctttcccccaggtttacatgttcttggt

SEQ ID NO: 20339 - RNA, 48 nt, synthetic construct
  source 1..48: mol_type = other RNA
atggggtcccccgactctggctttcccccaggtttacatgttcttagt

SEQ ID NO: 20340 - RNA, 48 nt, synthetic construct
  source 1..48: mol_type = other RNA
atggggtcccccgactctggctttcccccaggtttacatgttcctggt

SEQ ID NO: 20341 - RNA, 48 nt, synthetic construct
  source 1..48: mol_type = other RNA
atggggtcccccgactctggctttcccccaggtgtacatgtttttggt

SEQ ID NO: 20342 - RNA, 48 nt, synthetic construct
  source 1..48: mol_type = other RNA
atggggtcccccgactctggctttcccccaggtgtacatgtttttagt

SEQ ID NO: 20343 - RNA, 48 nt, synthetic construct
  source 1..48: mol_type = other RNA
atggggtcccccgactctggctttcccccaggtgtacatgtttctggt

SEQ ID NO: 20344 - RNA, 48 nt, synthetic construct
  source 1..48: mol_type = other RNA
atggggtcccccgactctggctttcccccaggtttacatgtttttggt

SEQ ID NO: 20345 - RNA, 48 nt, synthetic construct
  source 1..48: mol_type = other RNA
atggggtcccccgactctggctttcccccaggtctacatgtttttagt

SEQ ID NO: 20346 - RNA, 48 nt, synthetic construct
  source 1..48: mol_type = other RNA
atggggtcccccgactctggctttcccccaggtatacatgttcctggt

SEQ ID NO: 20347 - RNA, 48 nt, synthetic construct
  source 1..48: mol_type = other RNA
atggggtcccccgactctggctttcccccaggtatacatgttcttagt

SEQ ID NO: 20348 - RNA, 48 nt, synthetic construct
  source 1..48: mol_type = other RNA
atggggtcccccgactctggctttcccccaggtgtacatgttcctggt

SEQ ID NO: 20349 - RNA, 48 nt, synthetic construct
  source 1..48: mol_type = other RNA
atggggtcccccgactctggctttcccccaggtatacatgttcttggt

SEQ ID NO: 20350 - RNA, 48 nt, synthetic construct
  source 1..48: mol_type = other RNA
atggggtcccccgactctggctttcccccaggtatacatgtttctggt

SEQ ID NO: 20351 - RNA, 48 nt, synthetic construct
  source 1..48: mol_type = other RNA
atggggtcccccgactctggctttcccccaggtatacatgtttttagt

SEQ ID NO: 20352 - RNA, 48 nt, synthetic construct
  source 1..48: mol_type = other RNA
atggggtcccccgactctggctttcccccaggtctacatgttcctggt

SEQ ID NO: 20353 - RNA, 48 nt, synthetic construct
  source 1..48: mol_type = other RNA
atggggtcccccgactctggctttcccccaggtctacatgttcttagt

SEQ ID NO: 20354 - RNA, 48 nt, synthetic construct
  source 1..48: mol_type = other RNA
atggggtcccccgactctggctttcccccaggtctacatgtttctggt

SEQ ID NO: 20355 - RNA, 48 nt, synthetic construct
  source 1..48: mol_type = other RNA
atggggtcccccgactctggctttcccccaggtctacatgttcttggt

SEQ ID NO: 20356 - RNA, 48 nt, synthetic construct
  source 1..48: mol_type = other RNA
atggggtcccccgactctggctttcccccaggtatacatgtttttggt

SEQ ID NO: 20357 - RNA, 48 nt, synthetic construct
  source 1..48: mol_type = other RNA
atggggtcccccgactctggctttcccccaggtctacatgtttttggt

SEQ ID NO: 20358 - RNA, 49 nt, synthetic construct
  source 1..49: mol_type = other RNA
aatggggtcccccgactctggctttcccccaggtttacatgttcctggt

SEQ ID NO: 20359 - RNA, 49 nt, synthetic construct
  source 1..49: mol_type = other RNA
aatggggtcccccgactctggctttcccccaggtttacatgttcttagt

SEQ ID NO: 20360 - RNA, 49 nt, synthetic construct
  source 1..49: mol_type = other RNA
aatggggtcccccgactctggctttcccccaggtgtacatgtttctggt

SEQ ID NO: 20361 - RNA, 49 nt, synthetic construct
  source 1..49: mol_type = other RNA
aatggggtcccccgactctggctttcccccaggtgtacatgttcttggt

SEQ ID NO: 20362 - RNA, 49 nt, synthetic construct
  source 1..49: mol_type = other RNA
aatggggtcccccgactctggctttcccccaggtgtacatgttcttagt

SEQ ID NO: 20363 - RNA, 49 nt, synthetic construct
  source 1..49: mol_type = other RNA
aatggggtcccccgactctggctttcccccaggtgtacatgttcctggt

SEQ ID NO: 20364 - RNA, 49 nt, synthetic construct
  source 1..49: mol_type = other RNA
aatggggtcccccgactctggctttcccccaggtgtacatgtttttggt

SEQ ID NO: 20365 - RNA, 49 nt, synthetic construct
  source 1..49: mol_type = other RNA
aatggggtcccccgactctggctttcccccaggtgtacatgtttttagt

SEQ ID NO: 20366 - RNA, 49 nt, synthetic construct
  source 1..49: mol_type = other RNA
aatggggtcccccgactctggctttcccccaggtatacatgttcttggt

SEQ ID NO: 20367 - RNA, 49 nt, synthetic construct
  source 1..49: mol_type = other RNA
aatggggtcccccgactctggctttcccccaggtatacatgttcttagt

SEQ ID NO: 20368 - RNA, 49 nt, synthetic construct
  source 1..49: mol_type = other RNA
aatggggtcccccgactctggctttcccccaggtctacatgttcttggt

SEQ ID NO: 20369 - RNA, 49 nt, synthetic construct
  source 1..49: mol_type = other RNA
aatggggtcccccgactctggctttcccccaggtttacatgttcttggt

SEQ ID NO: 20370 - RNA, 49 nt, synthetic construct
  source 1..49: mol_type = other RNA
aatggggtcccccgactctggctttcccccaggtttacatgtttttagt

SEQ ID NO: 20371 - RNA, 49 nt, synthetic construct
  source 1..49: mol_type = other RNA
aatggggtcccccgactctggctttcccccaggtttacatgtttctggt

SEQ ID NO: 20372 - RNA, 49 nt, synthetic construct
  source 1..49: mol_type = other RNA
aatggggtcccccgactctggctttcccccaggtctacatgtttttagt

SEQ ID NO: 20373 - RNA, 49 nt, synthetic construct
  source 1..49: mol_type = other RNA
aatggggtcccccgactctggctttcccccaggtttacatgtttttggt

SEQ ID NO: 20374 - RNA, 49 nt, synthetic construct
  source 1..49: mol_type = other RNA
aatggggtcccccgactctggctttcccccaggtatacatgtttctggt

SEQ ID NO: 20375 - RNA, 49 nt, synthetic construct
  source 1..49: mol_type = other RNA
aatggggtcccccgactctggctttcccccaggtatacatgtttttagt

SEQ ID NO: 20376 - RNA, 49 nt, synthetic construct
  source 1..49: mol_type = other RNA
aatggggtcccccgactctggctttcccccaggtatacatgtttttggt

SEQ ID NO: 20377 - RNA, 49 nt, synthetic construct
  source 1..49: mol_type = other RNA
aatggggtcccccgactctggctttcccccaggtctacatgttcctggt

SEQ ID NO: 20378 - RNA, 49 nt, synthetic construct
  source 1..49: mol_type = other RNA
aatggggtcccccgactctggctttcccccaggtctacatgttcttagt

SEQ ID NO: 20379 - RNA, 49 nt, synthetic construct
  source 1..49: mol_type = other RNA
aatggggtcccccgactctggctttcccccaggtatacatgttcctggt

SEQ ID NO: 20380 - RNA, 49 nt, synthetic construct
  source 1..49: mol_type = other RNA
aatggggtcccccgactctggctttcccccaggtctacatgtttctggt

SEQ ID NO: 20381 - RNA, 49 nt, synthetic construct
  source 1..49: mol_type = other RNA
aatggggtcccccgactctggctttcccccaggtctacatgtttttggt

SEQ ID NO: 20382 - RNA, 50 nt, synthetic construct
  source 1..50: mol_type = other RNA
gaatggggtcccccgactctggctttcccccaggtgtacatgttcttggt

SEQ ID NO: 20383 - RNA, 50 nt, synthetic construct
  source 1..50: mol_type = other RNA
gaatggggtcccccgactctggctttcccccaggtctacatgtttttggt

SEQ ID NO: 20384 - RNA, 50 nt, synthetic construct
  source 1..50: mol_type = other RNA
gaatggggtcccccgactctggctttcccccaggtgtacatgtttttagt

SEQ ID NO: 20385 - RNA, 50 nt, synthetic construct
  source 1..50: mol_type = other RNA
gaatggggtcccccgactctggctttcccccaggtgtacatgtttttggt

SEQ ID NO: 20386 - RNA, 50 nt, synthetic construct
  source 1..50: mol_type = other RNA
gaatggggtcccccgactctggctttcccccaggtttacatgttcttagt

SEQ ID NO: 20387 - RNA, 50 nt, synthetic construct
  source 1..50: mol_type = other RNA
gaatggggtcccccgactctggctttcccccaggtttacatgtttctggt

SEQ ID NO: 20388 - RNA, 50 nt, synthetic construct
  source 1..50: mol_type = other RNA
gaatggggtcccccgactctggctttcccccaggtttacatgtttttagt

SEQ ID NO: 20389 - RNA, 50 nt, synthetic construct
  source 1..50: mol_type = other RNA
gaatggggtcccccgactctggctttcccccaggtttacatgtttttggt

SEQ ID NO: 20390 - RNA, 50 nt, synthetic construct
  source 1..50: mol_type = other RNA
gaatggggtcccccgactctggctttcccccaggtttacatgttcctggt

SEQ ID NO: 20391 - RNA, 50 nt, synthetic construct
  source 1..50: mol_type = other RNA
gaatggggtcccccgactctggctttcccccaggtgtacatgttcttagt

SEQ ID NO: 20392 - RNA, 50 nt, synthetic construct
  source 1..50: mol_type = other RNA
gaatggggtcccccgactctggctttcccccaggtgtacatgtttctggt

SEQ ID NO: 20393 - RNA, 50 nt, synthetic construct
  source 1..50: mol_type = other RNA
gaatggggtcccccgactctggctttcccccaggtttacatgttcttggt

SEQ ID NO: 20394 - RNA, 50 nt, synthetic construct
  source 1..50: mol_type = other RNA
gaatggggtcccccgactctggctttcccccaggtctacatgtttctggt

SEQ ID NO: 20395 - RNA, 50 nt, synthetic construct
  source 1..50: mol_type = other RNA
gaatggggtcccccgactctggctttcccccaggtatacatgttcttagt

SEQ ID NO: 20396 - RNA, 50 nt, synthetic construct
  source 1..50: mol_type = other RNA
gaatggggtcccccgactctggctttcccccaggtctacatgttcttggt

SEQ ID NO: 20397 - RNA, 50 nt, synthetic construct
  source 1..50: mol_type = other RNA
gaatggggtcccccgactctggctttcccccaggtctacatgttcttagt

SEQ ID NO: 20398 - RNA, 50 nt, synthetic construct
  source 1..50: mol_type = other RNA
gaatggggtcccccgactctggctttcccccaggtgtacatgttcctggt

SEQ ID NO: 20399 - RNA, 50 nt, synthetic construct
  source 1..50: mol_type = other RNA
gaatggggtcccccgactctggctttcccccaggtatacatgttcctggt

SEQ ID NO: 20400 - RNA, 50 nt, synthetic construct
  source 1..50: mol_type = other RNA
gaatggggtcccccgactctggctttcccccaggtctacatgtttttagt

SEQ ID NO: 20401 - RNA, 50 nt, synthetic construct
  source 1..50: mol_type = other RNA
gaatggggtcccccgactctggctttcccccaggtatacatgtttttagt

SEQ ID NO: 20402 - RNA, 50 nt, synthetic construct
  source 1..50: mol_type = other RNA
gaatggggtcccccgactctggctttcccccaggtatacatgtttttggt

SEQ ID NO: 20403 - RNA, 50 nt, synthetic construct
  source 1..50: mol_type = other RNA
gaatggggtcccccgactctggctttcccccaggtctacatgttcctggt

SEQ ID NO: 20404 - RNA, 50 nt, synthetic construct
  source 1..50: mol_type = other RNA
gaatggggtcccccgactctggctttcccccaggtatacatgttcttggt

SEQ ID NO: 20405 - RNA, 50 nt, synthetic construct
  source 1..50: mol_type = other RNA
gaatggggtcccccgactctggctttcccccaggtatacatgtttctggt

SEQ ID NO: 20406 - RNA, 51 nt, synthetic construct
  source 1..51: mol_type = other RNA
tgaatggggtcccccgactctggctttcccccaggtctacatgtttttagt

SEQ ID NO: 20407 - RNA, 51 nt, synthetic construct
  source 1..51: mol_type = other RNA
tgaatggggtcccccgactctggctttcccccaggtttacatgttcttagt

SEQ ID NO: 20408 - RNA, 51 nt, synthetic construct
  source 1..51: mol_type = other RNA
tgaatggggtcccccgactctggctttcccccaggtttacatgttcttggt

SEQ ID NO: 20409 - RNA, 51 nt, synthetic construct
  source 1..51: mol_type = other RNA
tgaatggggtcccccgactctggctttcccccaggtttacatgtttttagt

SEQ ID NO: 20410 - RNA, 51 nt, synthetic construct
  source 1..51: mol_type = other RNA
tgaatggggtcccccgactctggctttcccccaggtatacatgttcctggt

SEQ ID NO: 20411 - RNA, 51 nt, synthetic construct
  source 1..51: mol_type = other RNA
tgaatggggtcccccgactctggctttcccccaggtgtacatgtttttggt

SEQ ID NO: 20412 - RNA, 51 nt, synthetic construct
  source 1..51: mol_type = other RNA
tgaatggggtcccccgactctggctttcccccaggtgtacatgtttttagt

SEQ ID NO: 20413 - RNA, 51 nt, synthetic construct
  source 1..51: mol_type = other RNA
tgaatggggtcccccgactctggctttcccccaggtgtacatgtttctggt

SEQ ID NO: 20414 - RNA, 51 nt, synthetic construct
  source 1..51: mol_type = other RNA
tgaatggggtcccccgactctggctttcccccaggtgtacatgttcttggt

SEQ ID NO: 20415 - RNA, 51 nt, synthetic construct
  source 1..51: mol_type = other RNA
tgaatggggtcccccgactctggctttcccccaggtgtacatgttcttagt

SEQ ID NO: 20416 - RNA, 51 nt, synthetic construct
  source 1..51: mol_type = other RNA
tgaatggggtcccccgactctggctttcccccaggtgtacatgttcctggt

SEQ ID NO: 20417 - RNA, 51 nt, synthetic construct
  source 1..51: mol_type = other RNA
tgaatggggtcccccgactctggctttcccccaggtctacatgtttttggt

SEQ ID NO: 20418 - RNA, 51 nt, synthetic construct
  source 1..51: mol_type = other RNA
tgaatggggtcccccgactctggctttcccccaggtttacatgtttttggt

SEQ ID NO: 20419 - RNA, 51 nt, synthetic construct
  source 1..51: mol_type = other RNA
tgaatggggtcccccgactctggctttcccccaggtctacatgtttctggt

SEQ ID NO: 20420 - RNA, 51 nt, synthetic construct
  source 1..51: mol_type = other RNA
tgaatggggtcccccgactctggctttcccccaggtatacatgtttctggt

SEQ ID NO: 20421 - RNA, 51 nt, synthetic construct
  source 1..51: mol_type = other RNA
tgaatggggtcccccgactctggctttcccccaggtctacatgttcttggt

SEQ ID NO: 20422 - RNA, 51 nt, synthetic construct
  source 1..51: mol_type = other RNA
tgaatggggtcccccgactctggctttcccccaggtttacatgtttctggt

SEQ ID NO: 20423 - RNA, 51 nt, synthetic construct
  source 1..51: mol_type = other RNA
tgaatggggtcccccgactctggctttcccccaggtatacatgttcttagt

SEQ ID NO: 20424 - RNA, 51 nt, synthetic construct
  source 1..51: mol_type = other RNA
tgaatggggtcccccgactctggctttcccccaggtatacatgttcttggt

SEQ ID NO: 20425 - RNA, 51 nt, synthetic construct
  source 1..51: mol_type = other RNA
tgaatggggtcccccgactctggctttcccccaggtttacatgttcctggt

SEQ ID NO: 20426 - RNA, 51 nt, synthetic construct
  source 1..51: mol_type = other RNA
tgaatggggtcccccgactctggctttcccccaggtatacatgtttttagt

SEQ ID NO: 20427 - RNA, 51 nt, synthetic construct
  source 1..51: mol_type = other RNA
tgaatggggtcccccgactctggctttcccccaggtatacatgtttttggt

SEQ ID NO: 20428 - RNA, 51 nt, synthetic construct
  source 1..51: mol_type = other RNA
tgaatggggtcccccgactctggctttcccccaggtctacatgttcctggt

SEQ ID NO: 20429 - RNA, 51 nt, synthetic construct
  source 1..51: mol_type = other RNA
tgaatggggtcccccgactctggctttcccccaggtctacatgttcttagt

SEQ ID NO: 20430 - RNA, 52 nt, synthetic construct
  source 1..52: mol_type = other RNA
ctgaatggggtcccccgactctggctttcccccaggtctacatgttcttagt

SEQ ID NO: 20431 - RNA, 52 nt, synthetic construct
  source 1..52: mol_type = other RNA
ctgaatggggtcccccgactctggctttcccccaggtctacatgttcttggt

SEQ ID NO: 20432 - RNA, 52 nt, synthetic construct
  source 1..52: mol_type = other RNA
ctgaatggggtcccccgactctggctttcccccaggtttacatgttcttggt

SEQ ID NO: 20433 - RNA, 52 nt, synthetic construct
  source 1..52: mol_type = other RNA
ctgaatggggtcccccgactctggctttcccccaggtttacatgtttctggt

SEQ ID NO: 20434 - RNA, 52 nt, synthetic construct
  source 1..52: mol_type = other RNA
ctgaatggggtcccccgactctggctttcccccaggtatacatgttcttagt

SEQ ID NO: 20435 - RNA, 52 nt, synthetic construct
  source 1..52: mol_type = other RNA
ctgaatggggtcccccgactctggctttcccccaggtttacatgttcctggt

SEQ ID NO: 20436 - RNA, 52 nt, synthetic construct
  source 1..52: mol_type = other RNA
ctgaatggggtcccccgactctggctttcccccaggtgtacatgttcttggt

SEQ ID NO: 20437 - RNA, 52 nt, synthetic construct
  source 1..52: mol_type = other RNA
ctgaatggggtcccccgactctggctttcccccaggtgtacatgttcttagt

SEQ ID NO: 20438 - RNA, 52 nt, synthetic construct
  source 1..52: mol_type = other RNA
ctgaatggggtcccccgactctggctttcccccaggtgtacatgtttttagt

SEQ ID NO: 20439 - RNA, 52 nt, synthetic construct
  source 1..52: mol_type = other RNA
ctgaatggggtcccccgactctggctttcccccaggtgtacatgtttttggt

SEQ ID NO: 20440 - RNA, 52 nt, synthetic construct
  source 1..52: mol_type = other RNA
ctgaatggggtcccccgactctggctttcccccaggtctacatgtttctggt

SEQ ID NO: 20441 - RNA, 52 nt, synthetic construct
  source 1..52: mol_type = other RNA
ctgaatggggtcccccgactctggctttcccccaggtttacatgttcttagt

SEQ ID NO: 20442 - RNA, 52 nt, synthetic construct
  source 1..52: mol_type = other RNA
ctgaatggggtcccccgactctggctttcccccaggtttacatgtttttggt

SEQ ID NO: 20443 - RNA, 52 nt, synthetic construct
  source 1..52: mol_type = other RNA
ctgaatggggtcccccgactctggctttcccccaggtctacatgtttttggt

SEQ ID NO: 20444 - RNA, 52 nt, synthetic construct
  source 1..52: mol_type = other RNA
ctgaatggggtcccccgactctggctttcccccaggtttacatgtttttagt

SEQ ID NO: 20445 - RNA, 52 nt, synthetic construct
  source 1..52: mol_type = other RNA
ctgaatggggtcccccgactctggctttcccccaggtgtacatgttcctggt

SEQ ID NO: 20446 - RNA, 52 nt, synthetic construct
  source 1..52: mol_type = other RNA
ctgaatggggtcccccgactctggctttcccccaggtatacatgttcctggt

SEQ ID NO: 20447 - RNA, 52 nt, synthetic construct
  source 1..52: mol_type = other RNA
ctgaatggggtcccccgactctggctttcccccaggtgtacatgtttctggt

SEQ ID NO: 20448 - RNA, 52 nt, synthetic construct
  source 1..52: mol_type = other RNA
ctgaatggggtcccccgactctggctttcccccaggtctacatgttcctggt

SEQ ID NO: 20449 - RNA, 52 nt, synthetic construct
  source 1..52: mol_type = other RNA
ctgaatggggtcccccgactctggctttcccccaggtatacatgtttttggt

SEQ ID NO: 20450 - RNA, 52 nt, synthetic construct
  source 1..52: mol_type = other RNA
ctgaatggggtcccccgactctggctttcccccaggtatacatgtttttagt

SEQ ID NO: 20451 - RNA, 52 nt, synthetic construct
  source 1..52: mol_type = other RNA
ctgaatggggtcccccgactctggctttcccccaggtatacatgtttctggt

SEQ ID NO: 20452 - RNA, 52 nt, synthetic construct
  source 1..52: mol_type = other RNA
ctgaatggggtcccccgactctggctttcccccaggtatacatgttcttggt

SEQ ID NO: 20453 - RNA, 52 nt, synthetic construct
  source 1..52: mol_type = other RNA
ctgaatggggtcccccgactctggctttcccccaggtctacatgtttttagt

SEQ ID NO: 20454 - RNA, 53 nt, synthetic construct
  source 1..53: mol_type = other RNA
gctgaatggggtcccccgactctggctttcccccaggtttacatgtttttagt

SEQ ID NO: 20455 - RNA, 53 nt, synthetic construct
  source 1..53: mol_type = other RNA
gctgaatggggtcccccgactctggctttcccccaggtgtacatgttcttggt

SEQ ID NO: 20456 - RNA, 53 nt, synthetic construct
  source 1..53: mol_type = other RNA
gctgaatggggtcccccgactctggctttcccccaggtgtacatgttcttagt

SEQ ID NO: 20457 - RNA, 53 nt, synthetic construct
  source 1..53: mol_type = other RNA
gctgaatggggtcccccgactctggctttcccccaggtctacatgttcctggt

SEQ ID NO: 20458 - RNA, 53 nt, synthetic construct
  source 1..53: mol_type = other RNA
gctgaatggggtcccccgactctggctttcccccaggtctacatgtttttggt

SEQ ID NO: 20459 - RNA, 53 nt, synthetic construct
  source 1..53: mol_type = other RNA
gctgaatggggtcccccgactctggctttcccccaggtctacatgtttttagt

SEQ ID NO: 20460 - RNA, 53 nt, synthetic construct
  source 1..53: mol_type = other RNA
gctgaatggggtcccccgactctggctttcccccaggtctacatgtttctggt

SEQ ID NO: 20461 - RNA, 53 nt, synthetic construct
  source 1..53: mol_type = other RNA
gctgaatggggtcccccgactctggctttcccccaggtctacatgttcttggt

SEQ ID NO: 20462 - RNA, 53 nt, synthetic construct
  source 1..53: mol_type = other RNA
gctgaatggggtcccccgactctggctttcccccaggtctacatgttcttagt

SEQ ID NO: 20463 - RNA, 53 nt, synthetic construct
  source 1..53: mol_type = other RNA
gctgaatggggtcccccgactctggctttcccccaggtttacatgtttctggt

SEQ ID NO: 20464 - RNA, 53 nt, synthetic construct
  source 1..53: mol_type = other RNA
gctgaatggggtcccccgactctggctttcccccaggtttacatgtttttggt

SEQ ID NO: 20465 - RNA, 53 nt, synthetic construct
  source 1..53: mol_type = other RNA
gctgaatggggtcccccgactctggctttcccccaggtttacatgttcctggt

SEQ ID NO: 20466 - RNA, 53 nt, synthetic construct
  source 1..53: mol_type = other RNA
gctgaatggggtcccccgactctggctttcccccaggtgtacatgtttttggt

SEQ ID NO: 20467 - RNA, 53 nt, synthetic construct
  source 1..53: mol_type = other RNA
gctgaatggggtcccccgactctggctttcccccaggtatacatgtttctggt

SEQ ID NO: 20468 - RNA, 53 nt, synthetic construct
  source 1..53: mol_type = other RNA
gctgaatggggtcccccgactctggctttcccccaggtatacatgttcctggt

SEQ ID NO: 20469 - RNA, 53 nt, synthetic construct
  source 1..53: mol_type = other RNA
gctgaatggggtcccccgactctggctttcccccaggtgtacatgttcctggt

SEQ ID NO: 20470 - RNA, 53 nt, synthetic construct
  source 1..53: mol_type = other RNA
gctgaatggggtcccccgactctggctttcccccaggtatacatgttcttagt

SEQ ID NO: 20471 - RNA, 53 nt, synthetic construct
  source 1..53: mol_type = other RNA
gctgaatggggtcccccgactctggctttcccccaggtatacatgttcttggt

SEQ ID NO: 20472 - RNA, 53 nt, synthetic construct
  source 1..53: mol_type = other RNA
gctgaatggggtcccccgactctggctttcccccaggtatacatgtttttagt

SEQ ID NO: 20473 - RNA, 53 nt, synthetic construct
  source 1..53: mol_type = other RNA
gctgaatggggtcccccgactctggctttcccccaggtttacatgttcttggt

SEQ ID NO: 20474 - RNA, 53 nt, synthetic construct
  source 1..53: mol_type = other RNA
gctgaatggggtcccccgactctggctttcccccaggtttacatgttcttagt

SEQ ID NO: 20475 - RNA, 53 nt, synthetic construct
  source 1..53: mol_type = other RNA
gctgaatggggtcccccgactctggctttcccccaggtatacatgtttttggt

SEQ ID NO: 20476 - RNA, 53 nt, synthetic construct
  source 1..53: mol_type = other RNA
gctgaatggggtcccccgactctggctttcccccaggtgtacatgtttctggt

SEQ ID NO: 20477 - RNA, 53 nt, synthetic construct
  source 1..53: mol_type = other RNA
gctgaatggggtcccccgactctggctttcccccaggtgtacatgtttttagt

SEQ ID NO: 20478 - RNA, 54 nt, synthetic construct
  source 1..54: mol_type = other RNA
ggctgaatggggtcccccgactctggctttcccccaggtatacatgttcttagt

SEQ ID NO: 20479 - RNA, 54 nt, synthetic construct
  source 1..54: mol_type = other RNA
ggctgaatggggtcccccgactctggctttcccccaggtatacatgtttttagt

SEQ ID NO: 20480 - RNA, 54 nt, synthetic construct
  source 1..54: mol_type = other RNA
ggctgaatggggtcccccgactctggctttcccccaggtctacatgtttttagt

SEQ ID NO: 20481 - RNA, 54 nt, synthetic construct
  source 1..54: mol_type = other RNA
ggctgaatggggtcccccgactctggctttcccccaggtctacatgtttctggt

SEQ ID NO: 20482 - RNA, 54 nt, synthetic construct
  source 1..54: mol_type = other RNA
ggctgaatggggtcccccgactctggctttcccccaggtgtacatgttcctggt

SEQ ID NO: 20483 - RNA, 54 nt, synthetic construct
  source 1..54: mol_type = other RNA
ggctgaatggggtcccccgactctggctttcccccaggtttacatgtttttggt

SEQ ID NO: 20484 - RNA, 54 nt, synthetic construct
  source 1..54: mol_type = other RNA
ggctgaatggggtcccccgactctggctttcccccaggtttacatgtttttagt

SEQ ID NO: 20485 - RNA, 54 nt, synthetic construct
  source 1..54: mol_type = other RNA
ggctgaatggggtcccccgactctggctttcccccaggtttacatgttcttggt

SEQ ID NO: 20486 - RNA, 54 nt, synthetic construct
  source 1..54: mol_type = other RNA
ggctgaatggggtcccccgactctggctttcccccaggtttacatgttcttagt

SEQ ID NO: 20487 - RNA, 54 nt, synthetic construct
  source 1..54: mol_type = other RNA
ggctgaatggggtcccccgactctggctttcccccaggtttacatgtttctggt

SEQ ID NO: 20488 - RNA, 54 nt, synthetic construct
  source 1..54: mol_type = other RNA
ggctgaatggggtcccccgactctggctttcccccaggtgtacatgtttttggt

SEQ ID NO: 20489 - RNA, 54 nt, synthetic construct
  source 1..54: mol_type = other RNA
ggctgaatggggtcccccgactctggctttcccccaggtgtacatgtttttagt

SEQ ID NO: 20490 - RNA, 54 nt, synthetic construct
  source 1..54: mol_type = other RNA
ggctgaatggggtcccccgactctggctttcccccaggtgtacatgtttctggt

SEQ ID NO: 20491 - RNA, 54 nt, synthetic construct
  source 1..54: mol_type = other RNA
ggctgaatggggtcccccgactctggctttcccccaggtgtacatgttcttggt

SEQ ID NO: 20492 - RNA, 54 nt, synthetic construct
  source 1..54: mol_type = other RNA
ggctgaatggggtcccccgactctggctttcccccaggtttacatgttcctggt

SEQ ID NO: 20493 - RNA, 54 nt, synthetic construct
  source 1..54: mol_type = other RNA
ggctgaatggggtcccccgactctggctttcccccaggtgtacatgttcttagt

SEQ ID NO: 20494 - RNA, 54 nt, synthetic construct
  source 1..54: mol_type = other RNA
ggctgaatggggtcccccgactctggctttcccccaggtatacatgttcttggt

SEQ ID NO: 20495 - RNA, 54 nt, synthetic construct
  source 1..54: mol_type = other RNA
ggctgaatggggtcccccgactctggctttcccccaggtatacatgtttctggt

SEQ ID NO: 20496 - RNA, 54 nt, synthetic construct
  source 1..54: mol_type = other RNA
ggctgaatggggtcccccgactctggctttcccccaggtatacatgttcctggt

SEQ ID NO: 20497 - RNA, 54 nt, synthetic construct
  source 1..54: mol_type = other RNA
ggctgaatggggtcccccgactctggctttcccccaggtatacatgtttttggt

SEQ ID NO: 20498 - RNA, 54 nt, synthetic construct
  source 1..54: mol_type = other RNA
ggctgaatggggtcccccgactctggctttcccccaggtctacatgttcttagt

SEQ ID NO: 20499 - RNA, 54 nt, synthetic construct
  source 1..54: mol_type = other RNA
ggctgaatggggtcccccgactctggctttcccccaggtctacatgtttttggt

SEQ ID NO: 20500 - RNA, 54 nt, synthetic construct
  source 1..54: mol_type = other RNA
ggctgaatggggtcccccgactctggctttcccccaggtctacatgttcttggt

SEQ ID NO: 20501 - RNA, 54 nt, synthetic construct
  source 1..54: mol_type = other RNA
ggctgaatggggtcccccgactctggctttcccccaggtctacatgttcctggt

SEQ ID NO: 20502 - RNA, 55 nt, synthetic construct
  source 1..55: mol_type = other RNA
aggctgaatggggtcccccgactctggctttcccccaggtctacatgtttttagt

SEQ ID NO: 20503 - RNA, 55 nt, synthetic construct
  source 1..55: mol_type = other RNA
aggctgaatggggtcccccgactctggctttcccccaggtgtacatgtttttagt

SEQ ID NO: 20504 - RNA, 55 nt, synthetic construct
  source 1..55: mol_type = other RNA
aggctgaatggggtcccccgactctggctttcccccaggtgtacatgtttttggt

SEQ ID NO: 20505 - RNA, 55 nt, synthetic construct
  source 1..55: mol_type = other RNA
aggctgaatggggtcccccgactctggctttcccccaggtttacatgttcttagt

SEQ ID NO: 20506 - RNA, 55 nt, synthetic construct
  source 1..55: mol_type = other RNA
aggctgaatggggtcccccgactctggctttcccccaggtgtacatgttcttggt

SEQ ID NO: 20507 - RNA, 55 nt, synthetic construct
  source 1..55: mol_type = other RNA
aggctgaatggggtcccccgactctggctttcccccaggtttacatgttcttggt

SEQ ID NO: 20508 - RNA, 55 nt, synthetic construct
  source 1..55: mol_type = other RNA
aggctgaatggggtcccccgactctggctttcccccaggtttacatgtttctggt

SEQ ID NO: 20509 - RNA, 55 nt, synthetic construct
  source 1..55: mol_type = other RNA
aggctgaatggggtcccccgactctggctttcccccaggtttacatgtttttagt

SEQ ID NO: 20510 - RNA, 55 nt, synthetic construct
  source 1..55: mol_type = other RNA
aggctgaatggggtcccccgactctggctttcccccaggtttacatgtttttggt

SEQ ID NO: 20511 - RNA, 55 nt, synthetic construct
  source 1..55: mol_type = other RNA
aggctgaatggggtcccccgactctggctttcccccaggtttacatgttcctggt

SEQ ID NO: 20512 - RNA, 55 nt, synthetic construct
  source 1..55: mol_type = other RNA
aggctgaatggggtcccccgactctggctttcccccaggtgtacatgttcttagt

SEQ ID NO: 20513 - RNA, 55 nt, synthetic construct
  source 1..55: mol_type = other RNA
aggctgaatggggtcccccgactctggctttcccccaggtctacatgtttctggt

SEQ ID NO: 20514 - RNA, 55 nt, synthetic construct
  source 1..55: mol_type = other RNA
aggctgaatggggtcccccgactctggctttcccccaggtctacatgtttttggt

SEQ ID NO: 20515 - RNA, 55 nt, synthetic construct
  source 1..55: mol_type = other RNA
aggctgaatggggtcccccgactctggctttcccccaggtctacatgttcttggt

SEQ ID NO: 20516 - RNA, 55 nt, synthetic construct
  source 1..55: mol_type = other RNA
aggctgaatggggtcccccgactctggctttcccccaggtatacatgtttttggt

SEQ ID NO: 20517 - RNA, 55 nt, synthetic construct
  source 1..55: mol_type = other RNA
aggctgaatggggtcccccgactctggctttcccccaggtatacatgtttctggt

SEQ ID NO: 20518 - RNA, 55 nt, synthetic construct
  source 1..55: mol_type = other RNA
aggctgaatggggtcccccgactctggctttcccccaggtatacatgttcttggt

SEQ ID NO: 20519 - RNA, 55 nt, synthetic construct
  source 1..55: mol_type = other RNA
aggctgaatggggtcccccgactctggctttcccccaggtatacatgttcttagt

SEQ ID NO: 20520 - RNA, 55 nt, synthetic construct
  source 1..55: mol_type = other RNA
aggctgaatggggtcccccgactctggctttcccccaggtatacatgttcctggt

SEQ ID NO: 20521 - RNA, 55 nt, synthetic construct
  source 1..55: mol_type = other RNA
aggctgaatggggtcccccgactctggctttcccccaggtgtacatgttcctggt

SEQ ID NO: 20522 - RNA, 55 nt, synthetic construct
  source 1..55: mol_type = other RNA
aggctgaatggggtcccccgactctggctttcccccaggtctacatgttcttagt

SEQ ID NO: 20523 - RNA, 55 nt, synthetic construct
  source 1..55: mol_type = other RNA
aggctgaatggggtcccccgactctggctttcccccaggtatacatgtttttagt

SEQ ID NO: 20524 - RNA, 55 nt, synthetic construct
  source 1..55: mol_type = other RNA
aggctgaatggggtcccccgactctggctttcccccaggtgtacatgtttctggt

SEQ ID NO: 20525 - RNA, 55 nt, synthetic construct
  source 1..55: mol_type = other RNA
aggctgaatggggtcccccgactctggctttcccccaggtctacatgttcctggt

SEQ ID NO: 20526 - RNA, 56 nt, synthetic construct
  source 1..56: mol_type = other RNA
gaggctgaatggggtcccccgactctggctttcccccaggtttacatgttcttggt

SEQ ID NO: 20527 - RNA, 56 nt, synthetic construct
  source 1..56: mol_type = other RNA
gaggctgaatggggtcccccgactctggctttcccccaggtatacatgttcctggt

SEQ ID NO: 20528 - RNA, 56 nt, synthetic construct
  source 1..56: mol_type = other RNA
gaggctgaatggggtcccccgactctggctttcccccaggtttacatgtttttagt

SEQ ID NO: 20529 - RNA, 56 nt, synthetic construct
  source 1..56: mol_type = other RNA
gaggctgaatggggtcccccgactctggctttcccccaggtttacatgtttttggt

SEQ ID NO: 20530 - RNA, 56 nt, synthetic construct
  source 1..56: mol_type = other RNA
gaggctgaatggggtcccccgactctggctttcccccaggtttacatgttcctggt

SEQ ID NO: 20531 - RNA, 56 nt, synthetic construct
  source 1..56: mol_type = other RNA
gaggctgaatggggtcccccgactctggctttcccccaggtgtacatgtttttggt

SEQ ID NO: 20532 - RNA, 56 nt, synthetic construct
  source 1..56: mol_type = other RNA
gaggctgaatggggtcccccgactctggctttcccccaggtgtacatgtttttagt

SEQ ID NO: 20533 - RNA, 56 nt, synthetic construct
  source 1..56: mol_type = other RNA
gaggctgaatggggtcccccgactctggctttcccccaggtgtacatgtttctggt

SEQ ID NO: 20534 - RNA, 56 nt, synthetic construct
  source 1..56: mol_type = other RNA
gaggctgaatggggtcccccgactctggctttcccccaggtgtacatgttcttggt

SEQ ID NO: 20535 - RNA, 56 nt, synthetic construct
  source 1..56: mol_type = other RNA
gaggctgaatggggtcccccgactctggctttcccccaggtgtacatgttcttagt

SEQ ID NO: 20536 - RNA, 56 nt, synthetic construct
  source 1..56: mol_type = other RNA
gaggctgaatggggtcccccgactctggctttcccccaggtttacatgttcttagt

SEQ ID NO: 20537 - RNA, 56 nt, synthetic construct
  source 1..56: mol_type = other RNA
gaggctgaatggggtcccccgactctggctttcccccaggtgtacatgttcctggt

SEQ ID NO: 20538 - RNA, 56 nt, synthetic construct
  source 1..56: mol_type = other RNA
gaggctgaatggggtcccccgactctggctttcccccaggtctacatgtttttggt

SEQ ID NO: 20539 - RNA, 56 nt, synthetic construct
  source 1..56: mol_type = other RNA
gaggctgaatggggtcccccgactctggctttcccccaggtatacatgttcttggt

SEQ ID NO: 20540 - RNA, 56 nt, synthetic construct
  source 1..56: mol_type = other RNA
gaggctgaatggggtcccccgactctggctttcccccaggtctacatgtttctggt

SEQ ID NO: 20541 - RNA, 56 nt, synthetic construct
  source 1..56: mol_type = other RNA
gaggctgaatggggtcccccgactctggctttcccccaggtttacatgtttctggt

SEQ ID NO: 20542 - RNA, 56 nt, synthetic construct
  source 1..56: mol_type = other RNA
gaggctgaatggggtcccccgactctggctttcccccaggtctacatgtttttagt

SEQ ID NO: 20543 - RNA, 56 nt, synthetic construct
  source 1..56: mol_type = other RNA
gaggctgaatggggtcccccgactctggctttcccccaggtatacatgttcttagt

SEQ ID NO: 20544 - RNA, 56 nt, synthetic construct
  source 1..56: mol_type = other RNA
gaggctgaatggggtcccccgactctggctttcccccaggtatacatgtttttagt

SEQ ID NO: 20545 - RNA, 56 nt, synthetic construct
  source 1..56: mol_type = other RNA
gaggctgaatggggtcccccgactctggctttcccccaggtatacatgtttctggt

SEQ ID NO: 20546 - RNA, 56 nt, synthetic construct
  source 1..56: mol_type = other RNA
gaggctgaatggggtcccccgactctggctttcccccaggtctacatgttcctggt

SEQ ID NO: 20547 - RNA, 56 nt, synthetic construct
  source 1..56: mol_type = other RNA
gaggctgaatggggtcccccgactctggctttcccccaggtctacatgttcttagt

SEQ ID NO: 20548 - RNA, 56 nt, synthetic construct
  source 1..56: mol_type = other RNA
gaggctgaatggggtcccccgactctggctttcccccaggtatacatgtttttggt

SEQ ID NO: 20549 - RNA, 56 nt, synthetic construct
  source 1..56: mol_type = other RNA
gaggctgaatggggtcccccgactctggctttcccccaggtctacatgttcttggt

SEQ ID NO: 20550 - RNA, 57 nt, synthetic construct
  source 1..57: mol_type = other RNA
ggaggctgaatggggtcccccgactctggctttcccccaggtatacatgtttctggt

SEQ ID NO: 20551 - RNA, 57 nt, synthetic construct
  source 1..57: mol_type = other RNA
ggaggctgaatggggtcccccgactctggctttcccccaggtatacatgtttttagt

SEQ ID NO: 20552 - RNA, 57 nt, synthetic construct
  source 1..57: mol_type = other RNA
ggaggctgaatggggtcccccgactctggctttcccccaggtatacatgttcttagt

SEQ ID NO: 20553 - RNA, 57 nt, synthetic construct
  source 1..57: mol_type = other RNA
ggaggctgaatggggtcccccgactctggctttcccccaggtctacatgttcctggt

SEQ ID NO: 20554 - RNA, 57 nt, synthetic construct
  source 1..57: mol_type = other RNA
ggaggctgaatggggtcccccgactctggctttcccccaggtctacatgttcttagt

SEQ ID NO: 20555 - RNA, 57 nt, synthetic construct
  source 1..57: mol_type = other RNA
ggaggctgaatggggtcccccgactctggctttcccccaggtctacatgttcttggt

SEQ ID NO: 20556 - RNA, 57 nt, synthetic construct
  source 1..57: mol_type = other RNA
ggaggctgaatggggtcccccgactctggctttcccccaggtctacatgtttctggt

SEQ ID NO: 20557 - RNA, 57 nt, synthetic construct
  source 1..57: mol_type = other RNA
ggaggctgaatggggtcccccgactctggctttcccccaggtatacatgttcttggt

SEQ ID NO: 20558 - RNA, 57 nt, synthetic construct
  source 1..57: mol_type = other RNA
ggaggctgaatggggtcccccgactctggctttcccccaggtgtacatgttcttagt

SEQ ID NO: 20559 - RNA, 57 nt, synthetic construct
  source 1..57: mol_type = other RNA
ggaggctgaatggggtcccccgactctggctttcccccaggtatacatgtttttggt

SEQ ID NO: 20560 - RNA, 57 nt, synthetic construct
  source 1..57: mol_type = other RNA
ggaggctgaatggggtcccccgactctggctttcccccaggtgtacatgttcctggt

SEQ ID NO: 20561 - RNA, 57 nt, synthetic construct
  source 1..57: mol_type = other RNA
ggaggctgaatggggtcccccgactctggctttcccccaggtctacatgtttttggt

SEQ ID NO: 20562 - RNA, 57 nt, synthetic construct
  source 1..57: mol_type = other RNA
ggaggctgaatggggtcccccgactctggctttcccccaggtatacatgttcctggt

SEQ ID NO: 20563 - RNA, 57 nt, synthetic construct
  source 1..57: mol_type = other RNA
ggaggctgaatggggtcccccgactctggctttcccccaggtgtacatgttcttggt

SEQ ID NO: 20564 - RNA, 57 nt, synthetic construct
  source 1..57: mol_type = other RNA
ggaggctgaatggggtcccccgactctggctttcccccaggtctacatgtttttagt

SEQ ID NO: 20565 - RNA, 57 nt, synthetic construct
  source 1..57: mol_type = other RNA
ggaggctgaatggggtcccccgactctggctttcccccaggtgtacatgtttttggt

SEQ ID NO: 20566 - RNA, 57 nt, synthetic construct
  source 1..57: mol_type = other RNA
ggaggctgaatggggtcccccgactctggctttcccccaggtttacatgtttttggt

SEQ ID NO: 20567 - RNA, 57 nt, synthetic construct
  source 1..57: mol_type = other RNA
ggaggctgaatggggtcccccgactctggctttcccccaggtttacatgtttttagt

SEQ ID NO: 20568 - RNA, 57 nt, synthetic construct
  source 1..57: mol_type = other RNA
ggaggctgaatggggtcccccgactctggctttcccccaggtttacatgtttctggt

SEQ ID NO: 20569 - RNA, 57 nt, synthetic construct
  source 1..57: mol_type = other RNA
ggaggctgaatggggtcccccgactctggctttcccccaggtttacatgttcttagt

SEQ ID NO: 20570 - RNA, 57 nt, synthetic construct
  source 1..57: mol_type = other RNA
ggaggctgaatggggtcccccgactctggctttcccccaggtttacatgttcctggt

SEQ ID NO: 20571 - RNA, 57 nt, synthetic construct
  source 1..57: mol_type = other RNA
ggaggctgaatggggtcccccgactctggctttcccccaggtgtacatgtttttagt

SEQ ID NO: 20572 - RNA, 57 nt, synthetic construct
  source 1..57: mol_type = other RNA
ggaggctgaatggggtcccccgactctggctttcccccaggtgtacatgtttctggt

SEQ ID NO: 20573 - RNA, 57 nt, synthetic construct
  source 1..57: mol_type = other RNA
ggaggctgaatggggtcccccgactctggctttcccccaggtttacatgttcttggt

SEQ ID NO: 20574 - RNA, 58 nt, synthetic construct
  source 1..58: mol_type = other RNA
tggaggctgaatggggtcccccgactctggctttcccccaggtctacatgtttttagt

SEQ ID NO: 20575 - RNA, 58 nt, synthetic construct
  source 1..58: mol_type = other RNA
tggaggctgaatggggtcccccgactctggctttcccccaggtgtacatgttcttggt

SEQ ID NO: 20576 - RNA, 58 nt, synthetic construct
  source 1..58: mol_type = other RNA
tggaggctgaatggggtcccccgactctggctttcccccaggtgtacatgtttctggt

SEQ ID NO: 20577 - RNA, 58 nt, synthetic construct
  source 1..58: mol_type = other RNA
tggaggctgaatggggtcccccgactctggctttcccccaggtgtacatgtttttagt

SEQ ID NO: 20578 - RNA, 58 nt, synthetic construct
  source 1..58: mol_type = other RNA
tggaggctgaatggggtcccccgactctggctttcccccaggtttacatgttcctggt

SEQ ID NO: 20579 - RNA, 58 nt, synthetic construct
  source 1..58: mol_type = other RNA
tggaggctgaatggggtcccccgactctggctttcccccaggtttacatgttcttagt

SEQ ID NO: 20580 - RNA, 58 nt, synthetic construct
  source 1..58: mol_type = other RNA
tggaggctgaatggggtcccccgactctggctttcccccaggtttacatgttcttggt

SEQ ID NO: 20581 - RNA, 58 nt, synthetic construct
  source 1..58: mol_type = other RNA
tggaggctgaatggggtcccccgactctggctttcccccaggtctacatgttcctggt

SEQ ID NO: 20582 - RNA, 58 nt, synthetic construct
  source 1..58: mol_type = other RNA
tggaggctgaatggggtcccccgactctggctttcccccaggtttacatgtttttagt

SEQ ID NO: 20583 - RNA, 58 nt, synthetic construct
  source 1..58: mol_type = other RNA
tggaggctgaatggggtcccccgactctggctttcccccaggtttacatgtttctggt

SEQ ID NO: 20584 - RNA, 58 nt, synthetic construct
  source 1..58: mol_type = other RNA
tggaggctgaatggggtcccccgactctggctttcccccaggtttacatgtttttggt

SEQ ID NO: 20585 - RNA, 58 nt, synthetic construct
  source 1..58: mol_type = other RNA
tggaggctgaatggggtcccccgactctggctttcccccaggtgtacatgttcttagt

SEQ ID NO: 20586 - RNA, 58 nt, synthetic construct
  source 1..58: mol_type = other RNA
tggaggctgaatggggtcccccgactctggctttcccccaggtatacatgtttttagt

SEQ ID NO: 20587 - RNA, 58 nt, synthetic construct
  source 1..58: mol_type = other RNA
tggaggctgaatggggtcccccgactctggctttcccccaggtgtacatgtttttggt

SEQ ID NO: 20588 - RNA, 58 nt, synthetic construct
  source 1..58: mol_type = other RNA
tggaggctgaatggggtcccccgactctggctttcccccaggtatacatgttcctggt

SEQ ID NO: 20589 - RNA, 58 nt, synthetic construct
  source 1..58: mol_type = other RNA
tggaggctgaatggggtcccccgactctggctttcccccaggtctacatgtttttggt

SEQ ID NO: 20590 - RNA, 58 nt, synthetic construct
  source 1..58: mol_type = other RNA
tggaggctgaatggggtcccccgactctggctttcccccaggtatacatgttcttggt

SEQ ID NO: 20591 - RNA, 58 nt, synthetic construct
  source 1..58: mol_type = other RNA
tggaggctgaatggggtcccccgactctggctttcccccaggtatacatgtttctggt

SEQ ID NO: 20592 - RNA, 58 nt, synthetic construct
  source 1..58: mol_type = other RNA
tggaggctgaatggggtcccccgactctggctttcccccaggtatacatgtttttggt

SEQ ID NO: 20593 - RNA, 58 nt, synthetic construct
  source 1..58: mol_type = other RNA
tggaggctgaatggggtcccccgactctggctttcccccaggtctacatgttcttagt

SEQ ID NO: 20594 - RNA, 58 nt, synthetic construct
  source 1..58: mol_type = other RNA
tggaggctgaatggggtcccccgactctggctttcccccaggtctacatgttcttggt

SEQ ID NO: 20595 - RNA, 58 nt, synthetic construct
  source 1..58: mol_type = other RNA
tggaggctgaatggggtcccccgactctggctttcccccaggtctacatgtttctggt

SEQ ID NO: 20596 - RNA, 58 nt, synthetic construct
  source 1..58: mol_type = other RNA
tggaggctgaatggggtcccccgactctggctttcccccaggtatacatgttcttagt

SEQ ID NO: 20597 - RNA, 58 nt, synthetic construct
  source 1..58: mol_type = other RNA
tggaggctgaatggggtcccccgactctggctttcccccaggtgtacatgttcctggt

SEQ ID NO: 20598 - RNA, 59 nt, synthetic construct
  source 1..59: mol_type = other RNA
ttggaggctgaatggggtcccccgactctggctttcccccaggtctacatgttcttagt

SEQ ID NO: 20599 - RNA, 59 nt, synthetic construct
  source 1..59: mol_type = other RNA
ttggaggctgaatggggtcccccgactctggctttcccccaggtttacatgtttttggt

SEQ ID NO: 20600 - RNA, 59 nt, synthetic construct
  source 1..59: mol_type = other RNA
ttggaggctgaatggggtcccccgactctggctttcccccaggtgtacatgttcctggt

SEQ ID NO: 20601 - RNA, 59 nt, synthetic construct
  source 1..59: mol_type = other RNA
ttggaggctgaatggggtcccccgactctggctttcccccaggtgtacatgttcttagt

SEQ ID NO: 20602 - RNA, 59 nt, synthetic construct
  source 1..59: mol_type = other RNA
ttggaggctgaatggggtcccccgactctggctttcccccaggtgtacatgttcttggt

SEQ ID NO: 20603 - RNA, 59 nt, synthetic construct
  source 1..59: mol_type = other RNA
ttggaggctgaatggggtcccccgactctggctttcccccaggtgtacatgtttctggt

SEQ ID NO: 20604 - RNA, 59 nt, synthetic construct
  source 1..59: mol_type = other RNA
ttggaggctgaatggggtcccccgactctggctttcccccaggtttacatgttcttagt

SEQ ID NO: 20605 - RNA, 59 nt, synthetic construct
  source 1..59: mol_type = other RNA
ttggaggctgaatggggtcccccgactctggctttcccccaggtgtacatgtttttggt

SEQ ID NO: 20606 - RNA, 59 nt, synthetic construct
  source 1..59: mol_type = other RNA
ttggaggctgaatggggtcccccgactctggctttcccccaggtctacatgttcctggt

SEQ ID NO: 20607 - RNA, 59 nt, synthetic construct
  source 1..59: mol_type = other RNA
ttggaggctgaatggggtcccccgactctggctttcccccaggtctacatgtttttggt

SEQ ID NO: 20608 - RNA, 59 nt, synthetic construct
  source 1..59: mol_type = other RNA
ttggaggctgaatggggtcccccgactctggctttcccccaggtgtacatgtttttagt

SEQ ID NO: 20609 - RNA, 59 nt, synthetic construct
  source 1..59: mol_type = other RNA
ttggaggctgaatggggtcccccgactctggctttcccccaggtctacatgtttttagt

SEQ ID NO: 20610 - RNA, 59 nt, synthetic construct
  source 1..59: mol_type = other RNA
ttggaggctgaatggggtcccccgactctggctttcccccaggtttacatgttcctggt

SEQ ID NO: 20611 - RNA, 59 nt, synthetic construct
  source 1..59: mol_type = other RNA
ttggaggctgaatggggtcccccgactctggctttcccccaggtatacatgttcttggt

SEQ ID NO: 20612 - RNA, 59 nt, synthetic construct
  source 1..59: mol_type = other RNA
ttggaggctgaatggggtcccccgactctggctttcccccaggtctacatgtttctggt

SEQ ID NO: 20613 - RNA, 59 nt, synthetic construct
  source 1..59: mol_type = other RNA
ttggaggctgaatggggtcccccgactctggctttcccccaggtttacatgttcttggt

SEQ ID NO: 20614 - RNA, 59 nt, synthetic construct
  source 1..59: mol_type = other RNA
ttggaggctgaatggggtcccccgactctggctttcccccaggtatacatgttcctggt

SEQ ID NO: 20615 - RNA, 59 nt, synthetic construct
  source 1..59: mol_type = other RNA
ttggaggctgaatggggtcccccgactctggctttcccccaggtatacatgttcttagt

SEQ ID NO: 20616 - RNA, 59 nt, synthetic construct
  source 1..59: mol_type = other RNA
ttggaggctgaatggggtcccccgactctggctttcccccaggtctacatgttcttggt

SEQ ID NO: 20617 - RNA, 59 nt, synthetic construct
  source 1..59: mol_type = other RNA
ttggaggctgaatggggtcccccgactctggctttcccccaggtatacatgtttctggt

SEQ ID NO: 20618 - RNA, 59 nt, synthetic construct
  source 1..59: mol_type = other RNA
ttggaggctgaatggggtcccccgactctggctttcccccaggtatacatgtttttagt

SEQ ID NO: 20619 - RNA, 59 nt, synthetic construct
  source 1..59: mol_type = other RNA
ttggaggctgaatggggtcccccgactctggctttcccccaggtatacatgtttttggt

SEQ ID NO: 20620 - RNA, 59 nt, synthetic construct
  source 1..59: mol_type = other RNA
ttggaggctgaatggggtcccccgactctggctttcccccaggtttacatgtttctggt

SEQ ID NO: 20621 - RNA, 59 nt, synthetic construct
  source 1..59: mol_type = other RNA
ttggaggctgaatggggtcccccgactctggctttcccccaggtttacatgtttttagt

SEQ ID NO: 20622 - RNA, 60 nt, synthetic construct
  source 1..60: mol_type = other RNA
tttggaggctgaatggggtcccccgactctggctttcccccaggtctacatgtttctggt

SEQ ID NO: 20623 - RNA, 60 nt, synthetic construct
  source 1..60: mol_type = other RNA
tttggaggctgaatggggtcccccgactctggctttcccccaggtttacatgtttttggt

SEQ ID NO: 20624 - RNA, 60 nt, synthetic construct
  source 1..60: mol_type = other RNA
tttggaggctgaatggggtcccccgactctggctttcccccaggtctacatgttcttggt

SEQ ID NO: 20625 - RNA, 60 nt, synthetic construct
  source 1..60: mol_type = other RNA
tttggaggctgaatggggtcccccgactctggctttcccccaggtatacatgttcttagt

SEQ ID NO: 20626 - RNA, 60 nt, synthetic construct
  source 1..60: mol_type = other RNA
tttggaggctgaatggggtcccccgactctggctttcccccaggtgtacatgtttttggt

SEQ ID NO: 20627 - RNA, 60 nt, synthetic construct
  source 1..60: mol_type = other RNA
tttggaggctgaatggggtcccccgactctggctttcccccaggtgtacatgttcctggt

SEQ ID NO: 20628 - RNA, 60 nt, synthetic construct
  source 1..60: mol_type = other RNA
tttggaggctgaatggggtcccccgactctggctttcccccaggtttacatgtttttagt

SEQ ID NO: 20629 - RNA, 60 nt, synthetic construct
  source 1..60: mol_type = other RNA
tttggaggctgaatggggtcccccgactctggctttcccccaggtctacatgttcttagt

SEQ ID NO: 20630 - RNA, 60 nt, synthetic construct
  source 1..60: mol_type = other RNA
tttggaggctgaatggggtcccccgactctggctttcccccaggtttacatgtttctggt

SEQ ID NO: 20631 - RNA, 60 nt, synthetic construct
  source 1..60: mol_type = other RNA
tttggaggctgaatggggtcccccgactctggctttcccccaggtttacatgttcttagt

SEQ ID NO: 20632 - RNA, 60 nt, synthetic construct
  source 1..60: mol_type = other RNA
tttggaggctgaatggggtcccccgactctggctttcccccaggtttacatgttcctggt

SEQ ID NO: 20633 - RNA, 60 nt, synthetic construct
  source 1..60: mol_type = other RNA
tttggaggctgaatggggtcccccgactctggctttcccccaggtgtacatgtttttagt

SEQ ID NO: 20634 - RNA, 60 nt, synthetic construct
  source 1..60: mol_type = other RNA
tttggaggctgaatggggtcccccgactctggctttcccccaggtgtacatgtttctggt

SEQ ID NO: 20635 - RNA, 60 nt, synthetic construct
  source 1..60: mol_type = other RNA
tttggaggctgaatggggtcccccgactctggctttcccccaggtgtacatgttcttggt

SEQ ID NO: 20636 - RNA, 60 nt, synthetic construct
  source 1..60: mol_type = other RNA
tttggaggctgaatggggtcccccgactctggctttcccccaggtgtacatgttcttagt

SEQ ID NO: 20637 - RNA, 60 nt, synthetic construct
  source 1..60: mol_type = other RNA
tttggaggctgaatggggtcccccgactctggctttcccccaggtatacatgttcctggt

SEQ ID NO: 20638 - RNA, 60 nt, synthetic construct
  source 1..60: mol_type = other RNA
tttggaggctgaatggggtcccccgactctggctttcccccaggtctacatgttcctggt

SEQ ID NO: 20639 - RNA, 60 nt, synthetic construct
  source 1..60: mol_type = other RNA
tttggaggctgaatggggtcccccgactctggctttcccccaggtctacatgtttttagt

SEQ ID NO: 20640 - RNA, 60 nt, synthetic construct
  source 1..60: mol_type = other RNA
tttggaggctgaatggggtcccccgactctggctttcccccaggtctacatgtttttggt

SEQ ID NO: 20641 - RNA, 60 nt, synthetic construct
  source 1..60: mol_type = other RNA
tttggaggctgaatggggtcccccgactctggctttcccccaggtatacatgttcttggt

SEQ ID NO: 20642 - RNA, 60 nt, synthetic construct
  source 1..60: mol_type = other RNA
tttggaggctgaatggggtcccccgactctggctttcccccaggtatacatgtttctggt

SEQ ID NO: 20643 - RNA, 60 nt, synthetic construct
  source 1..60: mol_type = other RNA
tttggaggctgaatggggtcccccgactctggctttcccccaggtatacatgtttttagt

SEQ ID NO: 20644 - RNA, 60 nt, synthetic construct
  source 1..60: mol_type = other RNA
tttggaggctgaatggggtcccccgactctggctttcccccaggtatacatgtttttggt

SEQ ID NO: 20645 - RNA, 60 nt, synthetic construct
  source 1..60: mol_type = other RNA
tttggaggctgaatggggtcccccgactctggctttcccccaggtttacatgttcttggt

SEQ ID NO: 20646 - RNA, 61 nt, synthetic construct
  source 1..61: mol_type = other RNA
ctttggaggctgaatggggtcccccgactctggctttcccccaggtttacatgtttttagt

SEQ ID NO: 20647 - RNA, 61 nt, synthetic construct
  source 1..61: mol_type = other RNA
ctttggaggctgaatggggtcccccgactctggctttcccccaggtgtacatgttcctggt

SEQ ID NO: 20648 - RNA, 61 nt, synthetic construct
  source 1..61: mol_type = other RNA
ctttggaggctgaatggggtcccccgactctggctttcccccaggtttacatgtttctggt

SEQ ID NO: 20649 - RNA, 61 nt, synthetic construct
  source 1..61: mol_type = other RNA
ctttggaggctgaatggggtcccccgactctggctttcccccaggtttacatgttcttggt

SEQ ID NO: 20650 - RNA, 61 nt, synthetic construct
  source 1..61: mol_type = other RNA
ctttggaggctgaatggggtcccccgactctggctttcccccaggtttacatgttcttagt

SEQ ID NO: 20651 - RNA, 61 nt, synthetic construct
  source 1..61: mol_type = other RNA
ctttggaggctgaatggggtcccccgactctggctttcccccaggtttacatgttcctggt

SEQ ID NO: 20652 - RNA, 61 nt, synthetic construct
  source 1..61: mol_type = other RNA
ctttggaggctgaatggggtcccccgactctggctttcccccaggtgtacatgtttttggt

SEQ ID NO: 20653 - RNA, 61 nt, synthetic construct
  source 1..61: mol_type = other RNA
ctttggaggctgaatggggtcccccgactctggctttcccccaggtgtacatgtttttagt

SEQ ID NO: 20654 - RNA, 61 nt, synthetic construct
  source 1..61: mol_type = other RNA
ctttggaggctgaatggggtcccccgactctggctttcccccaggtgtacatgtttctggt

SEQ ID NO: 20655 - RNA, 61 nt, synthetic construct
  source 1..61: mol_type = other RNA
ctttggaggctgaatggggtcccccgactctggctttcccccaggtgtacatgttcttggt

SEQ ID NO: 20656 - RNA, 61 nt, synthetic construct
  source 1..61: mol_type = other RNA
ctttggaggctgaatggggtcccccgactctggctttcccccaggtgtacatgttcttagt

SEQ ID NO: 20657 - RNA, 61 nt, synthetic construct
  source 1..61: mol_type = other RNA
ctttggaggctgaatggggtcccccgactctggctttcccccaggtctacatgtttttggt

SEQ ID NO: 20658 - RNA, 61 nt, synthetic construct
  source 1..61: mol_type = other RNA
ctttggaggctgaatggggtcccccgactctggctttcccccaggtctacatgtttctggt

SEQ ID NO: 20659 - RNA, 61 nt, synthetic construct
  source 1..61: mol_type = other RNA
ctttggaggctgaatggggtcccccgactctggctttcccccaggtctacatgtttttagt

SEQ ID NO: 20660 - RNA, 61 nt, synthetic construct
  source 1..61: mol_type = other RNA
ctttggaggctgaatggggtcccccgactctggctttcccccaggtatacatgttcctggt

SEQ ID NO: 20661 - RNA, 61 nt, synthetic construct
  source 1..61: mol_type = other RNA
ctttggaggctgaatggggtcccccgactctggctttcccccaggtatacatgttcttagt

SEQ ID NO: 20662 - RNA, 61 nt, synthetic construct
  source 1..61: mol_type = other RNA
ctttggaggctgaatggggtcccccgactctggctttcccccaggtttacatgtttttggt

SEQ ID NO: 20663 - RNA, 61 nt, synthetic construct
  source 1..61: mol_type = other RNA
ctttggaggctgaatggggtcccccgactctggctttcccccaggtatacatgtttttggt

SEQ ID NO: 20664 - RNA, 61 nt, synthetic construct
  source 1..61: mol_type = other RNA
ctttggaggctgaatggggtcccccgactctggctttcccccaggtctacatgttcctggt

SEQ ID NO: 20665 - RNA, 61 nt, synthetic construct
  source 1..61: mol_type = other RNA
ctttggaggctgaatggggtcccccgactctggctttcccccaggtctacatgttcttagt

SEQ ID NO: 20666 - RNA, 61 nt, synthetic construct
  source 1..61: mol_type = other RNA
ctttggaggctgaatggggtcccccgactctggctttcccccaggtctacatgttcttggt

SEQ ID NO: 20667 - RNA, 61 nt, synthetic construct
  source 1..61: mol_type = other RNA
ctttggaggctgaatggggtcccccgactctggctttcccccaggtatacatgtttttagt

SEQ ID NO: 20668 - RNA, 61 nt, synthetic construct
  source 1..61: mol_type = other RNA
ctttggaggctgaatggggtcccccgactctggctttcccccaggtatacatgttcttggt

SEQ ID NO: 20669 - RNA, 61 nt, synthetic construct
  source 1..61: mol_type = other RNA
ctttggaggctgaatggggtcccccgactctggctttcccccaggtatacatgtttctggt

SEQ ID NO: 20670 - RNA, 62 nt, synthetic construct
  source 1..62: mol_type = other RNA
tctttggaggctgaatggggtcccccgactctggctttcccccaggtctacatgttcctggt

SEQ ID NO: 20671 - RNA, 62 nt, synthetic construct
  source 1..62: mol_type = other RNA
tctttggaggctgaatggggtcccccgactctggctttcccccaggtatacatgttcctggt

SEQ ID NO: 20672 - RNA, 62 nt, synthetic construct
  source 1..62: mol_type = other RNA
tctttggaggctgaatggggtcccccgactctggctttcccccaggtatacatgtttttagt

SEQ ID NO: 20673 - RNA, 62 nt, synthetic construct
  source 1..62: mol_type = other RNA
tctttggaggctgaatggggtcccccgactctggctttcccccaggtatacatgtttctggt

SEQ ID NO: 20674 - RNA, 62 nt, synthetic construct
  source 1..62: mol_type = other RNA
tctttggaggctgaatggggtcccccgactctggctttcccccaggtatacatgttcttggt

SEQ ID NO: 20675 - RNA, 62 nt, synthetic construct
  source 1..62: mol_type = other RNA
tctttggaggctgaatggggtcccccgactctggctttcccccaggtatacatgttcttagt

SEQ ID NO: 20676 - RNA, 62 nt, synthetic construct
  source 1..62: mol_type = other RNA
tctttggaggctgaatggggtcccccgactctggctttcccccaggtgtacatgttcctggt

SEQ ID NO: 20677 - RNA, 62 nt, synthetic construct
  source 1..62: mol_type = other RNA
tctttggaggctgaatggggtcccccgactctggctttcccccaggtctacatgtttttagt

SEQ ID NO: 20678 - RNA, 62 nt, synthetic construct
  source 1..62: mol_type = other RNA
tctttggaggctgaatggggtcccccgactctggctttcccccaggtatacatgtttttggt

SEQ ID NO: 20679 - RNA, 62 nt, synthetic construct
  source 1..62: mol_type = other RNA
tctttggaggctgaatggggtcccccgactctggctttcccccaggtgtacatgttcttagt

SEQ ID NO: 20680 - RNA, 62 nt, synthetic construct
  source 1..62: mol_type = other RNA
tctttggaggctgaatggggtcccccgactctggctttcccccaggtttacatgtttttagt

SEQ ID NO: 20681 - RNA, 62 nt, synthetic construct
  source 1..62: mol_type = other RNA
tctttggaggctgaatggggtcccccgactctggctttcccccaggtgtacatgttcttggt

SEQ ID NO: 20682 - RNA, 62 nt, synthetic construct
  source 1..62: mol_type = other RNA
tctttggaggctgaatggggtcccccgactctggctttcccccaggtgtacatgtttttagt

SEQ ID NO: 20683 - RNA, 62 nt, synthetic construct
  source 1..62: mol_type = other RNA
tctttggaggctgaatggggtcccccgactctggctttcccccaggtctacatgtttttggt

SEQ ID NO: 20684 - RNA, 62 nt, synthetic construct
  source 1..62: mol_type = other RNA
tctttggaggctgaatggggtcccccgactctggctttcccccaggtctacatgttcttagt

SEQ ID NO: 20685 - RNA, 62 nt, synthetic construct
  source 1..62: mol_type = other RNA
tctttggaggctgaatggggtcccccgactctggctttcccccaggtttacatgtttttggt

SEQ ID NO: 20686 - RNA, 62 nt, synthetic construct
  source 1..62: mol_type = other RNA
tctttggaggctgaatggggtcccccgactctggctttcccccaggtttacatgtttctggt

SEQ ID NO: 20687 - RNA, 62 nt, synthetic construct
  source 1..62: mol_type = other RNA
tctttggaggctgaatggggtcccccgactctggctttcccccaggtttacatgttcctggt

SEQ ID NO: 20688 - RNA, 62 nt, synthetic construct
  source 1..62: mol_type = other RNA
tctttggaggctgaatggggtcccccgactctggctttcccccaggtgtacatgtttttggt

SEQ ID NO: 20689 - RNA, 62 nt, synthetic construct
  source 1..62: mol_type = other RNA
tctttggaggctgaatggggtcccccgactctggctttcccccaggtgtacatgtttctggt

SEQ ID NO: 20690 - RNA, 62 nt, synthetic construct
  source 1..62: mol_type = other RNA
tctttggaggctgaatggggtcccccgactctggctttcccccaggtttacatgttcttggt

SEQ ID NO: 20691 - RNA, 62 nt, synthetic construct
  source 1..62: mol_type = other RNA
tctttggaggctgaatggggtcccccgactctggctttcccccaggtttacatgttcttagt

SEQ ID NO: 20692 - RNA, 62 nt, synthetic construct
  source 1..62: mol_type = other RNA
tctttggaggctgaatggggtcccccgactctggctttcccccaggtctacatgttcttggt

SEQ ID NO: 20693 - RNA, 62 nt, synthetic construct
  source 1..62: mol_type = other RNA
tctttggaggctgaatggggtcccccgactctggctttcccccaggtctacatgtttctggt

SEQ ID NO: 20694 - RNA, 63 nt, synthetic construct
  source 1..63: mol_type = other RNA
ctctttggaggctgaatggggtcccccgactctggctttcccccaggtctacatgttcctggt

SEQ ID NO: 20695 - RNA, 63 nt, synthetic construct
  source 1..63: mol_type = other RNA
ctctttggaggctgaatggggtcccccgactctggctttcccccaggtgtacatgttcttggt

SEQ ID NO: 20696 - RNA, 63 nt, synthetic construct
  source 1..63: mol_type = other RNA
ctctttggaggctgaatggggtcccccgactctggctttcccccaggtatacatgtttctggt

SEQ ID NO: 20697 - RNA, 63 nt, synthetic construct
  source 1..63: mol_type = other RNA
ctctttggaggctgaatggggtcccccgactctggctttcccccaggtttacatgtttttagt

SEQ ID NO: 20698 - RNA, 63 nt, synthetic construct
  source 1..63: mol_type = other RNA
ctctttggaggctgaatggggtcccccgactctggctttcccccaggtttacatgtttttggt

SEQ ID NO: 20699 - RNA, 63 nt, synthetic construct
  source 1..63: mol_type = other RNA
ctctttggaggctgaatggggtcccccgactctggctttcccccaggtttacatgtttctggt

SEQ ID NO: 20700 - RNA, 63 nt, synthetic construct
  source 1..63: mol_type = other RNA
ctctttggaggctgaatggggtcccccgactctggctttcccccaggtttacatgttcttggt

SEQ ID NO: 20701 - RNA, 63 nt, synthetic construct
  source 1..63: mol_type = other RNA
ctctttggaggctgaatggggtcccccgactctggctttcccccaggtttacatgttcttagt

SEQ ID NO: 20702 - RNA, 63 nt, synthetic construct
  source 1..63: mol_type = other RNA
ctctttggaggctgaatggggtcccccgactctggctttcccccaggtttacatgttcctggt

SEQ ID NO: 20703 - RNA, 63 nt, synthetic construct
  source 1..63: mol_type = other RNA
ctctttggaggctgaatggggtcccccgactctggctttcccccaggtgtacatgtttttagt

SEQ ID NO: 20704 - RNA, 63 nt, synthetic construct
  source 1..63: mol_type = other RNA
ctctttggaggctgaatggggtcccccgactctggctttcccccaggtgtacatgtttctggt

SEQ ID NO: 20705 - RNA, 63 nt, synthetic construct
  source 1..63: mol_type = other RNA
ctctttggaggctgaatggggtcccccgactctggctttcccccaggtatacatgttcctggt

SEQ ID NO: 20706 - RNA, 63 nt, synthetic construct
  source 1..63: mol_type = other RNA
ctctttggaggctgaatggggtcccccgactctggctttcccccaggtgtacatgttcttagt

SEQ ID NO: 20707 - RNA, 63 nt, synthetic construct
  source 1..63: mol_type = other RNA
ctctttggaggctgaatggggtcccccgactctggctttcccccaggtctacatgtttttggt

SEQ ID NO: 20708 - RNA, 63 nt, synthetic construct
  source 1..63: mol_type = other RNA
ctctttggaggctgaatggggtcccccgactctggctttcccccaggtatacatgttcttagt

SEQ ID NO: 20709 - RNA, 63 nt, synthetic construct
  source 1..63: mol_type = other RNA
ctctttggaggctgaatggggtcccccgactctggctttcccccaggtatacatgttcttggt

SEQ ID NO: 20710 - RNA, 63 nt, synthetic construct
  source 1..63: mol_type = other RNA
ctctttggaggctgaatggggtcccccgactctggctttcccccaggtatacatgtttttagt

SEQ ID NO: 20711 - RNA, 63 nt, synthetic construct
  source 1..63: mol_type = other RNA
ctctttggaggctgaatggggtcccccgactctggctttcccccaggtatacatgtttttggt

SEQ ID NO: 20712 - RNA, 63 nt, synthetic construct
  source 1..63: mol_type = other RNA
ctctttggaggctgaatggggtcccccgactctggctttcccccaggtgtacatgttcctggt

SEQ ID NO: 20713 - RNA, 63 nt, synthetic construct
  source 1..63: mol_type = other RNA
ctctttggaggctgaatggggtcccccgactctggctttcccccaggtctacatgttcttagt

SEQ ID NO: 20714 - RNA, 63 nt, synthetic construct
  source 1..63: mol_type = other RNA
ctctttggaggctgaatggggtcccccgactctggctttcccccaggtctacatgttcttggt

SEQ ID NO: 20715 - RNA, 63 nt, synthetic construct
  source 1..63: mol_type = other RNA
ctctttggaggctgaatggggtcccccgactctggctttcccccaggtctacatgtttctggt

SEQ ID NO: 20716 - RNA, 63 nt, synthetic construct
  source 1..63: mol_type = other RNA
ctctttggaggctgaatggggtcccccgactctggctttcccccaggtctacatgtttttagt

SEQ ID NO: 20717 - RNA, 63 nt, synthetic construct
  source 1..63: mol_type = other RNA
ctctttggaggctgaatggggtcccccgactctggctttcccccaggtgtacatgtttttggt

SEQ ID NO: 20718 - RNA, 64 nt, synthetic construct
  source 1..64: mol_type = other RNA
cctctttggaggctgaatggggtcccccgactctggctttcccccaggtttacatgttcttagt

SEQ ID NO: 20719 - RNA, 64 nt, synthetic construct
  source 1..64: mol_type = other RNA
cctctttggaggctgaatggggtcccccgactctggctttcccccaggtgtacatgttcttggt

SEQ ID NO: 20720 - RNA, 64 nt, synthetic construct
  source 1..64: mol_type = other RNA
cctctttggaggctgaatggggtcccccgactctggctttcccccaggtgtacatgtttttggt

SEQ ID NO: 20721 - RNA, 64 nt, synthetic construct
  source 1..64: mol_type = other RNA
cctctttggaggctgaatggggtcccccgactctggctttcccccaggtgtacatgtttttagt

SEQ ID NO: 20722 - RNA, 64 nt, synthetic construct
  source 1..64: mol_type = other RNA
cctctttggaggctgaatggggtcccccgactctggctttcccccaggtgtacatgtttctggt

SEQ ID NO: 20723 - RNA, 64 nt, synthetic construct
  source 1..64: mol_type = other RNA
cctctttggaggctgaatggggtcccccgactctggctttcccccaggtttacatgtttttggt

SEQ ID NO: 20724 - RNA, 64 nt, synthetic construct
  source 1..64: mol_type = other RNA
cctctttggaggctgaatggggtcccccgactctggctttcccccaggtgtacatgttcttagt

SEQ ID NO: 20725 - RNA, 64 nt, synthetic construct
  source 1..64: mol_type = other RNA
cctctttggaggctgaatggggtcccccgactctggctttcccccaggtttacatgttcttggt

SEQ ID NO: 20726 - RNA, 64 nt, synthetic construct
  source 1..64: mol_type = other RNA
cctctttggaggctgaatggggtcccccgactctggctttcccccaggtttacatgtttctggt

SEQ ID NO: 20727 - RNA, 64 nt, synthetic construct
  source 1..64: mol_type = other RNA
cctctttggaggctgaatggggtcccccgactctggctttcccccaggtctacatgtttttggt

SEQ ID NO: 20728 - RNA, 64 nt, synthetic construct
  source 1..64: mol_type = other RNA
cctctttggaggctgaatggggtcccccgactctggctttcccccaggtttacatgtttttagt

SEQ ID NO: 20729 - RNA, 64 nt, synthetic construct
  source 1..64: mol_type = other RNA
cctctttggaggctgaatggggtcccccgactctggctttcccccaggtctacatgtttttagt

SEQ ID NO: 20730 - RNA, 64 nt, synthetic construct
  source 1..64: mol_type = other RNA
cctctttggaggctgaatggggtcccccgactctggctttcccccaggtctacatgtttctggt

SEQ ID NO: 20731 - RNA, 64 nt, synthetic construct
  source 1..64: mol_type = other RNA
cctctttggaggctgaatggggtcccccgactctggctttcccccaggtctacatgttcttggt

SEQ ID NO: 20732 - RNA, 64 nt, synthetic construct
  source 1..64: mol_type = other RNA
cctctttggaggctgaatggggtcccccgactctggctttcccccaggtctacatgttcctggt

SEQ ID NO: 20733 - RNA, 64 nt, synthetic construct
  source 1..64: mol_type = other RNA
cctctttggaggctgaatggggtcccccgactctggctttcccccaggtctacatgttcttagt

SEQ ID NO: 20734 - RNA, 64 nt, synthetic construct
  source 1..64: mol_type = other RNA
cctctttggaggctgaatggggtcccccgactctggctttcccccaggtatacatgtttttagt

SEQ ID NO: 20735 - RNA, 64 nt, synthetic construct
  source 1..64: mol_type = other RNA
cctctttggaggctgaatggggtcccccgactctggctttcccccaggtatacatgtttctggt

SEQ ID NO: 20736 - RNA, 64 nt, synthetic construct
  source 1..64: mol_type = other RNA
cctctttggaggctgaatggggtcccccgactctggctttcccccaggtatacatgttcttggt

SEQ ID NO: 20737 - RNA, 64 nt, synthetic construct
  source 1..64: mol_type = other RNA
cctctttggaggctgaatggggtcccccgactctggctttcccccaggtatacatgttcttagt

SEQ ID NO: 20738 - RNA, 64 nt, synthetic construct
  source 1..64: mol_type = other RNA
cctctttggaggctgaatggggtcccccgactctggctttcccccaggtatacatgtttttggt

SEQ ID NO: 20739 - RNA, 64 nt, synthetic construct
  source 1..64: mol_type = other RNA
cctctttggaggctgaatggggtcccccgactctggctttcccccaggtgtacatgttcctggt

SEQ ID NO: 20740 - RNA, 64 nt, synthetic construct
  source 1..64: mol_type = other RNA
cctctttggaggctgaatggggtcccccgactctggctttcccccaggtatacatgttcctggt

SEQ ID NO: 20741 - RNA, 64 nt, synthetic construct
  source 1..64: mol_type = other RNA
cctctttggaggctgaatggggtcccccgactctggctttcccccaggtttacatgttcctggt

SEQ ID NO: 20742 - RNA, 65 nt, synthetic construct
  source 1..65: mol_type = other RNA
gcctctttggaggctgaatggggtcccccgactctggctttcccccaggtatacatgtttctggt

SEQ ID NO: 20743 - RNA, 65 nt, synthetic construct
  source 1..65: mol_type = other RNA
gcctctttggaggctgaatggggtcccccgactctggctttcccccaggtatacatgttcttggt

SEQ ID NO: 20744 - RNA, 65 nt, synthetic construct
  source 1..65: mol_type = other RNA
gcctctttggaggctgaatggggtcccccgactctggctttcccccaggtctacatgtttttagt

SEQ ID NO: 20745 - RNA, 65 nt, synthetic construct
  source 1..65: mol_type = other RNA
gcctctttggaggctgaatggggtcccccgactctggctttcccccaggtctacatgtttctggt

SEQ ID NO: 20746 - RNA, 65 nt, synthetic construct
  source 1..65: mol_type = other RNA
gcctctttggaggctgaatggggtcccccgactctggctttcccccaggtatacatgttcctggt

SEQ ID NO: 20747 - RNA, 65 nt, synthetic construct
  source 1..65: mol_type = other RNA
gcctctttggaggctgaatggggtcccccgactctggctttcccccaggtctacatgttcttggt

SEQ ID NO: 20748 - RNA, 65 nt, synthetic construct
  source 1..65: mol_type = other RNA
gcctctttggaggctgaatggggtcccccgactctggctttcccccaggtgtacatgttcctggt

SEQ ID NO: 20749 - RNA, 65 nt, synthetic construct
  source 1..65: mol_type = other RNA
gcctctttggaggctgaatggggtcccccgactctggctttcccccaggtttacatgttcttggt

SEQ ID NO: 20750 - RNA, 65 nt, synthetic construct
  source 1..65: mol_type = other RNA
gcctctttggaggctgaatggggtcccccgactctggctttcccccaggtttacatgttcttagt

SEQ ID NO: 20751 - RNA, 65 nt, synthetic construct
  source 1..65: mol_type = other RNA
gcctctttggaggctgaatggggtcccccgactctggctttcccccaggtgtacatgttcttagt

SEQ ID NO: 20752 - RNA, 65 nt, synthetic construct
  source 1..65: mol_type = other RNA
gcctctttggaggctgaatggggtcccccgactctggctttcccccaggtttacatgttcctggt

SEQ ID NO: 20753 - RNA, 65 nt, synthetic construct
  source 1..65: mol_type = other RNA
gcctctttggaggctgaatggggtcccccgactctggctttcccccaggtgtacatgttcttggt

SEQ ID NO: 20754 - RNA, 65 nt, synthetic construct
  source 1..65: mol_type = other RNA
gcctctttggaggctgaatggggtcccccgactctggctttcccccaggtttacatgtttttagt

SEQ ID NO: 20755 - RNA, 65 nt, synthetic construct
  source 1..65: mol_type = other RNA
gcctctttggaggctgaatggggtcccccgactctggctttcccccaggtgtacatgtttctggt

SEQ ID NO: 20756 - RNA, 65 nt, synthetic construct
  source 1..65: mol_type = other RNA
gcctctttggaggctgaatggggtcccccgactctggctttcccccaggtatacatgttcttagt

SEQ ID NO: 20757 - RNA, 65 nt, synthetic construct
  source 1..65: mol_type = other RNA
gcctctttggaggctgaatggggtcccccgactctggctttcccccaggtgtacatgtttttagt

SEQ ID NO: 20758 - RNA, 65 nt, synthetic construct
  source 1..65: mol_type = other RNA
gcctctttggaggctgaatggggtcccccgactctggctttcccccaggtttacatgtttctggt

SEQ ID NO: 20759 - RNA, 65 nt, synthetic construct
  source 1..65: mol_type = other RNA
gcctctttggaggctgaatggggtcccccgactctggctttcccccaggtgtacatgtttttggt

SEQ ID NO: 20760 - RNA, 65 nt, synthetic construct
  source 1..65: mol_type = other RNA
gcctctttggaggctgaatggggtcccccgactctggctttcccccaggtatacatgtttttggt

SEQ ID NO: 20761 - RNA, 65 nt, synthetic construct
  source 1..65: mol_type = other RNA
gcctctttggaggctgaatggggtcccccgactctggctttcccccaggtctacatgttcttagt

SEQ ID NO: 20762 - RNA, 65 nt, synthetic construct
  source 1..65: mol_type = other RNA
gcctctttggaggctgaatggggtcccccgactctggctttcccccaggtctacatgttcctggt

SEQ ID NO: 20763 - RNA, 65 nt, synthetic construct
  source 1..65: mol_type = other RNA
gcctctttggaggctgaatggggtcccccgactctggctttcccccaggtctacatgtttttggt

SEQ ID NO: 20764 - RNA, 65 nt, synthetic construct
  source 1..65: mol_type = other RNA
gcctctttggaggctgaatggggtcccccgactctggctttcccccaggtatacatgtttttagt

SEQ ID NO: 20765 - RNA, 65 nt, synthetic construct
  source 1..65: mol_type = other RNA
gcctctttggaggctgaatggggtcccccgactctggctttcccccaggtttacatgtttttggt

SEQ ID NO: 20766 - RNA, 66 nt, synthetic construct
  source 1..66: mol_type = other RNA
agcctctttggaggctgaatggggtcccccgactctggctttcccccaggtatacatgtttctggt

SEQ ID NO: 20767 - RNA, 66 nt, synthetic construct
  source 1..66: mol_type = other RNA
agcctctttggaggctgaatggggtcccccgactctggctttcccccaggtctacatgttcctggt

SEQ ID NO: 20768 - RNA, 66 nt, synthetic construct
  source 1..66: mol_type = other RNA
agcctctttggaggctgaatggggtcccccgactctggctttcccccaggtttacatgttcctggt

SEQ ID NO: 20769 - RNA, 66 nt, synthetic construct
  source 1..66: mol_type = other RNA
agcctctttggaggctgaatggggtcccccgactctggctttcccccaggtgtacatgttcttagt

SEQ ID NO: 20770 - RNA, 66 nt, synthetic construct
  source 1..66: mol_type = other RNA
agcctctttggaggctgaatggggtcccccgactctggctttcccccaggtctacatgtttttagt

SEQ ID NO: 20771 - RNA, 66 nt, synthetic construct
  source 1..66: mol_type = other RNA
agcctctttggaggctgaatggggtcccccgactctggctttcccccaggtctacatgtttttggt

SEQ ID NO: 20772 - RNA, 66 nt, synthetic construct
  source 1..66: mol_type = other RNA
agcctctttggaggctgaatggggtcccccgactctggctttcccccaggtctacatgtttctggt

SEQ ID NO: 20773 - RNA, 66 nt, synthetic construct
  source 1..66: mol_type = other RNA
agcctctttggaggctgaatggggtcccccgactctggctttcccccaggtctacatgttcttggt

SEQ ID NO: 20774 - RNA, 66 nt, synthetic construct
  source 1..66: mol_type = other RNA
agcctctttggaggctgaatggggtcccccgactctggctttcccccaggtatacatgtttttggt

SEQ ID NO: 20775 - RNA, 66 nt, synthetic construct
  source 1..66: mol_type = other RNA
agcctctttggaggctgaatggggtcccccgactctggctttcccccaggtttacatgtttttagt

SEQ ID NO: 20776 - RNA, 66 nt, synthetic construct
  source 1..66: mol_type = other RNA
agcctctttggaggctgaatggggtcccccgactctggctttcccccaggtatacatgtttttagt

SEQ ID NO: 20777 - RNA, 66 nt, synthetic construct
  source 1..66: mol_type = other RNA
agcctctttggaggctgaatggggtcccccgactctggctttcccccaggtatacatgttcttggt

SEQ ID NO: 20778 - RNA, 66 nt, synthetic construct
  source 1..66: mol_type = other RNA
agcctctttggaggctgaatggggtcccccgactctggctttcccccaggtatacatgttcctggt

SEQ ID NO: 20779 - RNA, 66 nt, synthetic construct
  source 1..66: mol_type = other RNA
agcctctttggaggctgaatggggtcccccgactctggctttcccccaggtgtacatgttcctggt

SEQ ID NO: 20780 - RNA, 66 nt, synthetic construct
  source 1..66: mol_type = other RNA
agcctctttggaggctgaatggggtcccccgactctggctttcccccaggtctacatgttcttagt

SEQ ID NO: 20781 - RNA, 66 nt, synthetic construct
  source 1..66: mol_type = other RNA
agcctctttggaggctgaatggggtcccccgactctggctttcccccaggtttacatgtttttggt

SEQ ID NO: 20782 - RNA, 66 nt, synthetic construct
  source 1..66: mol_type = other RNA
agcctctttggaggctgaatggggtcccccgactctggctttcccccaggtttacatgtttctggt

SEQ ID NO: 20783 - RNA, 66 nt, synthetic construct
  source 1..66: mol_type = other RNA
agcctctttggaggctgaatggggtcccccgactctggctttcccccaggtttacatgttcttggt

SEQ ID NO: 20784 - RNA, 66 nt, synthetic construct
  source 1..66: mol_type = other RNA
agcctctttggaggctgaatggggtcccccgactctggctttcccccaggtgtacatgttcttggt

SEQ ID NO: 20785 - RNA, 66 nt, synthetic construct
  source 1..66: mol_type = other RNA
agcctctttggaggctgaatggggtcccccgactctggctttcccccaggtttacatgttcttagt

SEQ ID NO: 20786 - RNA, 66 nt, synthetic construct
  source 1..66: mol_type = other RNA
agcctctttggaggctgaatggggtcccccgactctggctttcccccaggtgtacatgtttttggt

SEQ ID NO: 20787 - RNA, 66 nt, synthetic construct
  source 1..66: mol_type = other RNA
agcctctttggaggctgaatggggtcccccgactctggctttcccccaggtgtacatgtttttagt

SEQ ID NO: 20788 - RNA, 66 nt, synthetic construct
  source 1..66: mol_type = other RNA
agcctctttggaggctgaatggggtcccccgactctggctttcccccaggtgtacatgtttctggt

SEQ ID NO: 20789 - RNA, 66 nt, synthetic construct
  source 1..66: mol_type = other RNA
agcctctttggaggctgaatggggtcccccgactctggctttcccccaggtatacatgttcttagt

SEQ ID NO: 20790 - RNA, 67 nt, synthetic construct
  source 1..67: mol_type = other RNA
aagcctctttggaggctgaatggggtcccccgactctggctttcccccaggtctacatgtttttggt

SEQ ID NO: 20791 - RNA, 67 nt, synthetic construct
  source 1..67: mol_type = other RNA
aagcctctttggaggctgaatggggtcccccgactctggctttcccccaggtttacatgtttttggt

SEQ ID NO: 20792 - RNA, 67 nt, synthetic construct
  source 1..67: mol_type = other RNA
aagcctctttggaggctgaatggggtcccccgactctggctttcccccaggtttacatgttcttagt

SEQ ID NO: 20793 - RNA, 67 nt, synthetic construct
  source 1..67: mol_type = other RNA
aagcctctttggaggctgaatggggtcccccgactctggctttcccccaggtttacatgttcctggt

SEQ ID NO: 20794 - RNA, 67 nt, synthetic construct
  source 1..67: mol_type = other RNA
aagcctctttggaggctgaatggggtcccccgactctggctttcccccaggtgtacatgtttttggt

SEQ ID NO: 20795 - RNA, 67 nt, synthetic construct
  source 1..67: mol_type = other RNA
aagcctctttggaggctgaatggggtcccccgactctggctttcccccaggtgtacatgtttttagt

SEQ ID NO: 20796 - RNA, 67 nt, synthetic construct
  source 1..67: mol_type = other RNA
aagcctctttggaggctgaatggggtcccccgactctggctttcccccaggtgtacatgtttctggt

SEQ ID NO: 20797 - RNA, 67 nt, synthetic construct
  source 1..67: mol_type = other RNA
aagcctctttggaggctgaatggggtcccccgactctggctttcccccaggtgtacatgttcttggt

SEQ ID NO: 20798 - RNA, 67 nt, synthetic construct
  source 1..67: mol_type = other RNA
aagcctctttggaggctgaatggggtcccccgactctggctttcccccaggtgtacatgttcttagt

SEQ ID NO: 20799 - RNA, 67 nt, synthetic construct
  source 1..67: mol_type = other RNA
aagcctctttggaggctgaatggggtcccccgactctggctttcccccaggtgtacatgttcctggt

SEQ ID NO: 20800 - RNA, 67 nt, synthetic construct
  source 1..67: mol_type = other RNA
aagcctctttggaggctgaatggggtcccccgactctggctttcccccaggtttacatgttcttggt

SEQ ID NO: 20801 - RNA, 67 nt, synthetic construct
  source 1..67: mol_type = other RNA
aagcctctttggaggctgaatggggtcccccgactctggctttcccccaggtctacatgtttctggt

SEQ ID NO: 20802 - RNA, 67 nt, synthetic construct
  source 1..67: mol_type = other RNA
aagcctctttggaggctgaatggggtcccccgactctggctttcccccaggtctacatgttcttggt

SEQ ID NO: 20803 - RNA, 67 nt, synthetic construct
  source 1..67: mol_type = other RNA
aagcctctttggaggctgaatggggtcccccgactctggctttcccccaggtctacatgttcttagt

SEQ ID NO: 20804 - RNA, 67 nt, synthetic construct
  source 1..67: mol_type = other RNA
aagcctctttggaggctgaatggggtcccccgactctggctttcccccaggtctacatgttcctggt

SEQ ID NO: 20805 - RNA, 67 nt, synthetic construct
  source 1..67: mol_type = other RNA
aagcctctttggaggctgaatggggtcccccgactctggctttcccccaggtatacatgtttttggt

SEQ ID NO: 20806 - RNA, 67 nt, synthetic construct
  source 1..67: mol_type = other RNA
aagcctctttggaggctgaatggggtcccccgactctggctttcccccaggtatacatgttcctggt

SEQ ID NO: 20807 - RNA, 67 nt, synthetic construct
  source 1..67: mol_type = other RNA
aagcctctttggaggctgaatggggtcccccgactctggctttcccccaggtatacatgtttttagt

SEQ ID NO: 20808 - RNA, 67 nt, synthetic construct
  source 1..67: mol_type = other RNA
aagcctctttggaggctgaatggggtcccccgactctggctttcccccaggtatacatgtttctggt

SEQ ID NO: 20809 - RNA, 67 nt, synthetic construct
  source 1..67: mol_type = other RNA
aagcctctttggaggctgaatggggtcccccgactctggctttcccccaggtatacatgttcttagt

SEQ ID NO: 20810 - RNA, 67 nt, synthetic construct
  source 1..67: mol_type = other RNA
aagcctctttggaggctgaatggggtcccccgactctggctttcccccaggtatacatgttcttggt

SEQ ID NO: 20811 - RNA, 67 nt, synthetic construct
  source 1..67: mol_type = other RNA
aagcctctttggaggctgaatggggtcccccgactctggctttcccccaggtttacatgtttttagt

SEQ ID NO: 20812 - RNA, 67 nt, synthetic construct
  source 1..67: mol_type = other RNA
aagcctctttggaggctgaatggggtcccccgactctggctttcccccaggtctacatgtttttagt

SEQ ID NO: 20813 - RNA, 67 nt, synthetic construct
  source 1..67: mol_type = other RNA
aagcctctttggaggctgaatggggtcccccgactctggctttcccccaggtttacatgtttctggt

SEQ ID NO: 20814 - RNA, 68 nt, synthetic construct
  source 1..68: mol_type = other RNA
aaagcctctttggaggctgaatggggtcccccgactctggctttcccccaggtatacatgttcttggt

SEQ ID NO: 20815 - RNA, 68 nt, synthetic construct
  source 1..68: mol_type = other RNA
aaagcctctttggaggctgaatggggtcccccgactctggctttcccccaggtctacatgttcctggt

SEQ ID NO: 20816 - RNA, 68 nt, synthetic construct
  source 1..68: mol_type = other RNA
aaagcctctttggaggctgaatggggtcccccgactctggctttcccccaggtctacatgttcttagt

SEQ ID NO: 20817 - RNA, 68 nt, synthetic construct
  source 1..68: mol_type = other RNA
aaagcctctttggaggctgaatggggtcccccgactctggctttcccccaggtatacatgtttctggt

SEQ ID NO: 20818 - RNA, 68 nt, synthetic construct
  source 1..68: mol_type = other RNA
aaagcctctttggaggctgaatggggtcccccgactctggctttcccccaggtctacatgttcttggt

SEQ ID NO: 20819 - RNA, 68 nt, synthetic construct
  source 1..68: mol_type = other RNA
aaagcctctttggaggctgaatggggtcccccgactctggctttcccccaggtctacatgtttctggt

SEQ ID NO: 20820 - RNA, 68 nt, synthetic construct
  source 1..68: mol_type = other RNA
aaagcctctttggaggctgaatggggtcccccgactctggctttcccccaggtatacatgtttttggt

SEQ ID NO: 20821 - RNA, 68 nt, synthetic construct
  source 1..68: mol_type = other RNA
aaagcctctttggaggctgaatggggtcccccgactctggctttcccccaggtatacatgttcttagt

SEQ ID NO: 20822 - RNA, 68 nt, synthetic construct
  source 1..68: mol_type = other RNA
aaagcctctttggaggctgaatggggtcccccgactctggctttcccccaggtctacatgtttttagt

SEQ ID NO: 20823 - RNA, 68 nt, synthetic construct
  source 1..68: mol_type = other RNA
aaagcctctttggaggctgaatggggtcccccgactctggctttcccccaggtatacatgtttttagt

SEQ ID NO: 20824 - RNA, 68 nt, synthetic construct
  source 1..68: mol_type = other RNA
aaagcctctttggaggctgaatggggtcccccgactctggctttcccccaggtttacatgttcctggt

SEQ ID NO: 20825 - RNA, 68 nt, synthetic construct
  source 1..68: mol_type = other RNA
aaagcctctttggaggctgaatggggtcccccgactctggctttcccccaggtttacatgttcttggt

SEQ ID NO: 20826 - RNA, 68 nt, synthetic construct
  source 1..68: mol_type = other RNA
aaagcctctttggaggctgaatggggtcccccgactctggctttcccccaggtttacatgttcttagt

SEQ ID NO: 20827 - RNA, 68 nt, synthetic construct
  source 1..68: mol_type = other RNA
aaagcctctttggaggctgaatggggtcccccgactctggctttcccccaggtttacatgtttttggt

SEQ ID NO: 20828 - RNA, 68 nt, synthetic construct
  source 1..68: mol_type = other RNA
aaagcctctttggaggctgaatggggtcccccgactctggctttcccccaggtatacatgttcctggt

SEQ ID NO: 20829 - RNA, 68 nt, synthetic construct
  source 1..68: mol_type = other RNA
aaagcctctttggaggctgaatggggtcccccgactctggctttcccccaggtgtacatgttcctggt

SEQ ID NO: 20830 - RNA, 68 nt, synthetic construct
  source 1..68: mol_type = other RNA
aaagcctctttggaggctgaatggggtcccccgactctggctttcccccaggtctacatgtttttggt

SEQ ID NO: 20831 - RNA, 68 nt, synthetic construct
  source 1..68: mol_type = other RNA
aaagcctctttggaggctgaatggggtcccccgactctggctttcccccaggtttacatgtttttagt

SEQ ID NO: 20832 - RNA, 68 nt, synthetic construct
  source 1..68: mol_type = other RNA
aaagcctctttggaggctgaatggggtcccccgactctggctttcccccaggtgtacatgtttttggt

SEQ ID NO: 20833 - RNA, 68 nt, synthetic construct
  source 1..68: mol_type = other RNA
aaagcctctttggaggctgaatggggtcccccgactctggctttcccccaggtttacatgtttctggt

SEQ ID NO: 20834 - RNA, 68 nt, synthetic construct
  source 1..68: mol_type = other RNA
aaagcctctttggaggctgaatggggtcccccgactctggctttcccccaggtgtacatgtttttagt

SEQ ID NO: 20835 - RNA, 68 nt, synthetic construct
  source 1..68: mol_type = other RNA
aaagcctctttggaggctgaatggggtcccccgactctggctttcccccaggtgtacatgtttctggt

SEQ ID NO: 20836 - RNA, 68 nt, synthetic construct
  source 1..68: mol_type = other RNA
aaagcctctttggaggctgaatggggtcccccgactctggctttcccccaggtgtacatgttcttggt

SEQ ID NO: 20837 - RNA, 68 nt, synthetic construct
  source 1..68: mol_type = other RNA
aaagcctctttggaggctgaatggggtcccccgactctggctttcccccaggtgtacatgttcttagt

SEQ ID NO: 20838 - RNA, 69 nt, synthetic construct
  source 1..69: mol_type = other RNA
caaagcctctttggaggctgaatggggtcccccgactctggctttcccccaggtttacatgttcttggt

SEQ ID NO: 20839 - RNA, 69 nt, synthetic construct
  source 1..69: mol_type = other RNA
caaagcctctttggaggctgaatggggtcccccgactctggctttcccccaggtctacatgttcttggt

SEQ ID NO: 20840 - RNA, 69 nt, synthetic construct
  source 1..69: mol_type = other RNA
caaagcctctttggaggctgaatggggtcccccgactctggctttcccccaggtatacatgtttttggt

SEQ ID NO: 20841 - RNA, 69 nt, synthetic construct
  source 1..69: mol_type = other RNA
caaagcctctttggaggctgaatggggtcccccgactctggctttcccccaggtctacatgtttttagt

SEQ ID NO: 20842 - RNA, 69 nt, synthetic construct
  source 1..69: mol_type = other RNA
caaagcctctttggaggctgaatggggtcccccgactctggctttcccccaggtctacatgtttctggt

SEQ ID NO: 20843 - RNA, 69 nt, synthetic construct
  source 1..69: mol_type = other RNA
caaagcctctttggaggctgaatggggtcccccgactctggctttcccccaggtctacatgttcctggt

SEQ ID NO: 20844 - RNA, 69 nt, synthetic construct
  source 1..69: mol_type = other RNA
caaagcctctttggaggctgaatggggtcccccgactctggctttcccccaggtttacatgtttttagt

SEQ ID NO: 20845 - RNA, 69 nt, synthetic construct
  source 1..69: mol_type = other RNA
caaagcctctttggaggctgaatggggtcccccgactctggctttcccccaggtttacatgtttttggt

SEQ ID NO: 20846 - RNA, 69 nt, synthetic construct
  source 1..69: mol_type = other RNA
caaagcctctttggaggctgaatggggtcccccgactctggctttcccccaggtgtacatgttcttggt

SEQ ID NO: 20847 - RNA, 69 nt, synthetic construct
  source 1..69: mol_type = other RNA
caaagcctctttggaggctgaatggggtcccccgactctggctttcccccaggtctacatgttcttagt

SEQ ID NO: 20848 - RNA, 69 nt, synthetic construct
  source 1..69: mol_type = other RNA
caaagcctctttggaggctgaatggggtcccccgactctggctttcccccaggtttacatgtttctggt

SEQ ID NO: 20849 - RNA, 69 nt, synthetic construct
  source 1..69: mol_type = other RNA
caaagcctctttggaggctgaatggggtcccccgactctggctttcccccaggtttacatgttcttagt

SEQ ID NO: 20850 - RNA, 69 nt, synthetic construct
  source 1..69: mol_type = other RNA
caaagcctctttggaggctgaatggggtcccccgactctggctttcccccaggtttacatgttcctggt

SEQ ID NO: 20851 - RNA, 69 nt, synthetic construct
  source 1..69: mol_type = other RNA
caaagcctctttggaggctgaatggggtcccccgactctggctttcccccaggtgtacatgtttttagt

SEQ ID NO: 20852 - RNA, 69 nt, synthetic construct
  source 1..69: mol_type = other RNA
caaagcctctttggaggctgaatggggtcccccgactctggctttcccccaggtgtacatgtttctggt

SEQ ID NO: 20853 - RNA, 69 nt, synthetic construct
  source 1..69: mol_type = other RNA
caaagcctctttggaggctgaatggggtcccccgactctggctttcccccaggtgtacatgtttttggt

SEQ ID NO: 20854 - RNA, 69 nt, synthetic construct
  source 1..69: mol_type = other RNA
caaagcctctttggaggctgaatggggtcccccgactctggctttcccccaggtgtacatgttcctggt

SEQ ID NO: 20855 - RNA, 69 nt, synthetic construct
  source 1..69: mol_type = other RNA
caaagcctctttggaggctgaatggggtcccccgactctggctttcccccaggtatacatgtttttagt

SEQ ID NO: 20856 - RNA, 69 nt, synthetic construct
  source 1..69: mol_type = other RNA
caaagcctctttggaggctgaatggggtcccccgactctggctttcccccaggtctacatgtttttggt

SEQ ID NO: 20857 - RNA, 69 nt, synthetic construct
  source 1..69: mol_type = other RNA
caaagcctctttggaggctgaatggggtcccccgactctggctttcccccaggtatacatgttcttggt

SEQ ID NO: 20858 - RNA, 69 nt, synthetic construct
  source 1..69: mol_type = other RNA
caaagcctctttggaggctgaatggggtcccccgactctggctttcccccaggtatacatgtttctggt

SEQ ID NO: 20859 - RNA, 69 nt, synthetic construct
  source 1..69: mol_type = other RNA
caaagcctctttggaggctgaatggggtcccccgactctggctttcccccaggtatacatgttcttagt

SEQ ID NO: 20860 - RNA, 69 nt, synthetic construct
  source 1..69: mol_type = other RNA
caaagcctctttggaggctgaatggggtcccccgactctggctttcccccaggtatacatgttcctggt

SEQ ID NO: 20861 - RNA, 69 nt, synthetic construct
  source 1..69: mol_type = other RNA
caaagcctctttggaggctgaatggggtcccccgactctggctttcccccaggtgtacatgttcttagt

SEQ ID NO: 20862 - RNA, 70 nt, synthetic construct
  source 1..70: mol_type = other RNA
gcaaagcctctttggaggctgaatggggtcccccgactctggctttcccccaggtatacatgttcttggt

SEQ ID NO: 20863 - RNA, 70 nt, synthetic construct
  source 1..70: mol_type = other RNA
gcaaagcctctttggaggctgaatggggtcccccgactctggctttcccccaggtttacatgtttttggt

SEQ ID NO: 20864 - RNA, 70 nt, synthetic construct
  source 1..70: mol_type = other RNA
gcaaagcctctttggaggctgaatggggtcccccgactctggctttcccccaggtctacatgttcttggt

SEQ ID NO: 20865 - RNA, 70 nt, synthetic construct
  source 1..70: mol_type = other RNA
gcaaagcctctttggaggctgaatggggtcccccgactctggctttcccccaggtatacatgttcttagt

SEQ ID NO: 20866 - RNA, 70 nt, synthetic construct
  source 1..70: mol_type = other RNA
gcaaagcctctttggaggctgaatggggtcccccgactctggctttcccccaggtatacatgtttctggt

SEQ ID NO: 20867 - RNA, 70 nt, synthetic construct
  source 1..70: mol_type = other RNA
gcaaagcctctttggaggctgaatggggtcccccgactctggctttcccccaggtatacatgtttttagt

SEQ ID NO: 20868 - RNA, 70 nt, synthetic construct
  source 1..70: mol_type = other RNA
gcaaagcctctttggaggctgaatggggtcccccgactctggctttcccccaggtctacatgttcctggt

SEQ ID NO: 20869 - RNA, 70 nt, synthetic construct
  source 1..70: mol_type = other RNA
gcaaagcctctttggaggctgaatggggtcccccgactctggctttcccccaggtctacatgttcttagt

SEQ ID NO: 20870 - RNA, 70 nt, synthetic construct
  source 1..70: mol_type = other RNA
gcaaagcctctttggaggctgaatggggtcccccgactctggctttcccccaggtatacatgttcctggt

SEQ ID NO: 20871 - RNA, 70 nt, synthetic construct
  source 1..70: mol_type = other RNA
gcaaagcctctttggaggctgaatggggtcccccgactctggctttcccccaggtctacatgtttctggt

SEQ ID NO: 20872 - RNA, 70 nt, synthetic construct
  source 1..70: mol_type = other RNA
gcaaagcctctttggaggctgaatggggtcccccgactctggctttcccccaggtctacatgtttttggt

SEQ ID NO: 20873 - RNA, 70 nt, synthetic construct
  source 1..70: mol_type = other RNA
gcaaagcctctttggaggctgaatggggtcccccgactctggctttcccccaggtctacatgtttttagt

SEQ ID NO: 20874 - RNA, 70 nt, synthetic construct
  source 1..70: mol_type = other RNA
gcaaagcctctttggaggctgaatggggtcccccgactctggctttcccccaggtttacatgtttttagt

SEQ ID NO: 20875 - RNA, 70 nt, synthetic construct
  source 1..70: mol_type = other RNA
gcaaagcctctttggaggctgaatggggtcccccgactctggctttcccccaggtttacatgtttctggt

SEQ ID NO: 20876 - RNA, 70 nt, synthetic construct
  source 1..70: mol_type = other RNA
gcaaagcctctttggaggctgaatggggtcccccgactctggctttcccccaggtttacatgttcttggt

SEQ ID NO: 20877 - RNA, 70 nt, synthetic construct
  source 1..70: mol_type = other RNA
gcaaagcctctttggaggctgaatggggtcccccgactctggctttcccccaggtttacatgttcctggt

SEQ ID NO: 20878 - RNA, 70 nt, synthetic construct
  source 1..70: mol_type = other RNA
gcaaagcctctttggaggctgaatggggtcccccgactctggctttcccccaggtttacatgttcttagt

SEQ ID NO: 20879 - RNA, 70 nt, synthetic construct
  source 1..70: mol_type = other RNA
gcaaagcctctttggaggctgaatggggtcccccgactctggctttcccccaggtgtacatgtttttagt

SEQ ID NO: 20880 - RNA, 70 nt, synthetic construct
  source 1..70: mol_type = other RNA
gcaaagcctctttggaggctgaatggggtcccccgactctggctttcccccaggtgtacatgtttctggt

SEQ ID NO: 20881 - RNA, 70 nt, synthetic construct
  source 1..70: mol_type = other RNA
gcaaagcctctttggaggctgaatggggtcccccgactctggctttcccccaggtgtacatgttcttggt

SEQ ID NO: 20882 - RNA, 70 nt, synthetic construct
  source 1..70: mol_type = other RNA
gcaaagcctctttggaggctgaatggggtcccccgactctggctttcccccaggtatacatgtttttggt

SEQ ID NO: 20883 - RNA, 70 nt, synthetic construct
  source 1..70: mol_type = other RNA
gcaaagcctctttggaggctgaatggggtcccccgactctggctttcccccaggtgtacatgttcttagt

SEQ ID NO: 20884 - RNA, 70 nt, synthetic construct
  source 1..70: mol_type = other RNA
gcaaagcctctttggaggctgaatggggtcccccgactctggctttcccccaggtgtacatgttcctggt

SEQ ID NO: 20885 - RNA, 70 nt, synthetic construct
  source 1..70: mol_type = other RNA
gcaaagcctctttggaggctgaatggggtcccccgactctggctttcccccaggtgtacatgtttttggt

SEQ ID NO: 20886 - RNA, 71 nt, synthetic construct
  source 1..71: mol_type = other RNA
agcaaagcctctttggaggctgaatggggtcccccgactctggctttcccccaggtttacatgtttctggt

SEQ ID NO: 20887 - RNA, 71 nt, synthetic construct
  source 1..71: mol_type = other RNA
agcaaagcctctttggaggctgaatggggtcccccgactctggctttcccccaggtttacatgttcttggt

SEQ ID NO: 20888 - RNA, 71 nt, synthetic construct
  source 1..71: mol_type = other RNA
agcaaagcctctttggaggctgaatggggtcccccgactctggctttcccccaggtttacatgttcttagt

SEQ ID NO: 20889 - RNA, 71 nt, synthetic construct
  source 1..71: mol_type = other RNA
agcaaagcctctttggaggctgaatggggtcccccgactctggctttcccccaggtgtacatgtttttggt

SEQ ID NO: 20890 - RNA, 71 nt, synthetic construct
  source 1..71: mol_type = other RNA
agcaaagcctctttggaggctgaatggggtcccccgactctggctttcccccaggtgtacatgtttttagt

SEQ ID NO: 20891 - RNA, 71 nt, synthetic construct
  source 1..71: mol_type = other RNA
agcaaagcctctttggaggctgaatggggtcccccgactctggctttcccccaggtgtacatgtttctggt

SEQ ID NO: 20892 - RNA, 71 nt, synthetic construct
  source 1..71: mol_type = other RNA
agcaaagcctctttggaggctgaatggggtcccccgactctggctttcccccaggtgtacatgttcttggt

SEQ ID NO: 20893 - RNA, 71 nt, synthetic construct
  source 1..71: mol_type = other RNA
agcaaagcctctttggaggctgaatggggtcccccgactctggctttcccccaggtctacatgttcttggt

SEQ ID NO: 20894 - RNA, 71 nt, synthetic construct
  source 1..71: mol_type = other RNA
agcaaagcctctttggaggctgaatggggtcccccgactctggctttcccccaggtctacatgttcctggt

SEQ ID NO: 20895 - RNA, 71 nt, synthetic construct
  source 1..71: mol_type = other RNA
agcaaagcctctttggaggctgaatggggtcccccgactctggctttcccccaggtttacatgtttttagt

SEQ ID NO: 20896 - RNA, 71 nt, synthetic construct
  source 1..71: mol_type = other RNA
agcaaagcctctttggaggctgaatggggtcccccgactctggctttcccccaggtttacatgtttttggt

SEQ ID NO: 20897 - RNA, 71 nt, synthetic construct
  source 1..71: mol_type = other RNA
agcaaagcctctttggaggctgaatggggtcccccgactctggctttcccccaggtttacatgttcctggt

SEQ ID NO: 20898 - RNA, 71 nt, synthetic construct
  source 1..71: mol_type = other RNA
agcaaagcctctttggaggctgaatggggtcccccgactctggctttcccccaggtgtacatgttcttagt

SEQ ID NO: 20899 - RNA, 71 nt, synthetic construct
  source 1..71: mol_type = other RNA
agcaaagcctctttggaggctgaatggggtcccccgactctggctttcccccaggtctacatgtttctggt

SEQ ID NO: 20900 - RNA, 71 nt, synthetic construct
  source 1..71: mol_type = other RNA
agcaaagcctctttggaggctgaatggggtcccccgactctggctttcccccaggtctacatgtttttggt

SEQ ID NO: 20901 - RNA, 71 nt, synthetic construct
  source 1..71: mol_type = other RNA
agcaaagcctctttggaggctgaatggggtcccccgactctggctttcccccaggtctacatgtttttagt

SEQ ID NO: 20902 - RNA, 71 nt, synthetic construct
  source 1..71: mol_type = other RNA
agcaaagcctctttggaggctgaatggggtcccccgactctggctttcccccaggtatacatgtttttggt

SEQ ID NO: 20903 - RNA, 71 nt, synthetic construct
  source 1..71: mol_type = other RNA
agcaaagcctctttggaggctgaatggggtcccccgactctggctttcccccaggtatacatgtttttagt

SEQ ID NO: 20904 - RNA, 71 nt, synthetic construct
  source 1..71: mol_type = other RNA
agcaaagcctctttggaggctgaatggggtcccccgactctggctttcccccaggtatacatgtttctggt

SEQ ID NO: 20905 - RNA, 71 nt, synthetic construct
  source 1..71: mol_type = other RNA
agcaaagcctctttggaggctgaatggggtcccccgactctggctttcccccaggtatacatgttcttggt

SEQ ID NO: 20906 - RNA, 71 nt, synthetic construct
  source 1..71: mol_type = other RNA
agcaaagcctctttggaggctgaatggggtcccccgactctggctttcccccaggtatacatgttcctggt

SEQ ID NO: 20907 - RNA, 71 nt, synthetic construct
  source 1..71: mol_type = other RNA
agcaaagcctctttggaggctgaatggggtcccccgactctggctttcccccaggtgtacatgttcctggt

SEQ ID NO: 20908 - RNA, 71 nt, synthetic construct
  source 1..71: mol_type = other RNA
agcaaagcctctttggaggctgaatggggtcccccgactctggctttcccccaggtctacatgttcttagt

SEQ ID NO: 20909 - RNA, 71 nt, synthetic construct
  source 1..71: mol_type = other RNA
agcaaagcctctttggaggctgaatggggtcccccgactctggctttcccccaggtatacatgttcttagt

SEQ ID NO: 20910 - RNA, 72 nt, synthetic construct
  source 1..72: mol_type = other RNA
cagcaaagcctctttggaggctgaatggggtcccccgactctggctttcccccaggtctacatgtttctggt

SEQ ID NO: 20911 - RNA, 72 nt, synthetic construct
  source 1..72: mol_type = other RNA
cagcaaagcctctttggaggctgaatggggtcccccgactctggctttcccccaggtttacatgttcttggt

SEQ ID NO: 20912 - RNA, 72 nt, synthetic construct
  source 1..72: mol_type = other RNA
cagcaaagcctctttggaggctgaatggggtcccccgactctggctttcccccaggtctacatgtttttagt

SEQ ID NO: 20913 - RNA, 72 nt, synthetic construct
  source 1..72: mol_type = other RNA
cagcaaagcctctttggaggctgaatggggtcccccgactctggctttcccccaggtatacatgttcctggt

SEQ ID NO: 20914 - RNA, 72 nt, synthetic construct
  source 1..72: mol_type = other RNA
cagcaaagcctctttggaggctgaatggggtcccccgactctggctttcccccaggtgtacatgtttttggt

SEQ ID NO: 20915 - RNA, 72 nt, synthetic construct
  source 1..72: mol_type = other RNA
cagcaaagcctctttggaggctgaatggggtcccccgactctggctttcccccaggtgtacatgtttttagt

SEQ ID NO: 20916 - RNA, 72 nt, synthetic construct
  source 1..72: mol_type = other RNA
cagcaaagcctctttggaggctgaatggggtcccccgactctggctttcccccaggtgtacatgtttctggt

SEQ ID NO: 20917 - RNA, 72 nt, synthetic construct
  source 1..72: mol_type = other RNA
cagcaaagcctctttggaggctgaatggggtcccccgactctggctttcccccaggtgtacatgttcttggt

SEQ ID NO: 20918 - RNA, 72 nt, synthetic construct
  source 1..72: mol_type = other RNA
cagcaaagcctctttggaggctgaatggggtcccccgactctggctttcccccaggtgtacatgttcttagt

SEQ ID NO: 20919 - RNA, 72 nt, synthetic construct
  source 1..72: mol_type = other RNA
cagcaaagcctctttggaggctgaatggggtcccccgactctggctttcccccaggtgtacatgttcctggt

SEQ ID NO: 20920 - RNA, 72 nt, synthetic construct
  source 1..72: mol_type = other RNA
cagcaaagcctctttggaggctgaatggggtcccccgactctggctttcccccaggtctacatgtttttggt

SEQ ID NO: 20921 - RNA, 72 nt, synthetic construct
  source 1..72: mol_type = other RNA
cagcaaagcctctttggaggctgaatggggtcccccgactctggctttcccccaggtctacatgttcttggt

SEQ ID NO: 20922 - RNA, 72 nt, synthetic construct
  source 1..72: mol_type = other RNA
cagcaaagcctctttggaggctgaatggggtcccccgactctggctttcccccaggtatacatgttcttagt

SEQ ID NO: 20923 - RNA, 72 nt, synthetic construct
  source 1..72: mol_type = other RNA
cagcaaagcctctttggaggctgaatggggtcccccgactctggctttcccccaggtctacatgttcctggt

SEQ ID NO: 20924 - RNA, 72 nt, synthetic construct
  source 1..72: mol_type = other RNA
cagcaaagcctctttggaggctgaatggggtcccccgactctggctttcccccaggtttacatgttcttagt

SEQ ID NO: 20925 - RNA, 72 nt, synthetic construct
  source 1..72: mol_type = other RNA
cagcaaagcctctttggaggctgaatggggtcccccgactctggctttcccccaggtttacatgttcctggt

SEQ ID NO: 20926 - RNA, 72 nt, synthetic construct
  source 1..72: mol_type = other RNA
cagcaaagcctctttggaggctgaatggggtcccccgactctggctttcccccaggtttacatgtttctggt

SEQ ID NO: 20927 - RNA, 72 nt, synthetic construct
  source 1..72: mol_type = other RNA
cagcaaagcctctttggaggctgaatggggtcccccgactctggctttcccccaggtttacatgtttttggt

SEQ ID NO: 20928 - RNA, 72 nt, synthetic construct
  source 1..72: mol_type = other RNA
cagcaaagcctctttggaggctgaatggggtcccccgactctggctttcccccaggtatacatgttcttggt

SEQ ID NO: 20929 - RNA, 72 nt, synthetic construct
  source 1..72: mol_type = other RNA
cagcaaagcctctttggaggctgaatggggtcccccgactctggctttcccccaggtatacatgtttctggt

SEQ ID NO: 20930 - RNA, 72 nt, synthetic construct
  source 1..72: mol_type = other RNA
cagcaaagcctctttggaggctgaatggggtcccccgactctggctttcccccaggtttacatgtttttagt

SEQ ID NO: 20931 - RNA, 72 nt, synthetic construct
  source 1..72: mol_type = other RNA
cagcaaagcctctttggaggctgaatggggtcccccgactctggctttcccccaggtctacatgttcttagt

SEQ ID NO: 20932 - RNA, 72 nt, synthetic construct
  source 1..72: mol_type = other RNA
cagcaaagcctctttggaggctgaatggggtcccccgactctggctttcccccaggtatacatgtttttggt

SEQ ID NO: 20933 - RNA, 72 nt, synthetic construct
  source 1..72: mol_type = other RNA
cagcaaagcctctttggaggctgaatggggtcccccgactctggctttcccccaggtatacatgtttttagt

SEQ ID NO: 20934 - RNA, 73 nt, synthetic construct
  source 1..73: mol_type = other RNA
acagcaaagcctctttggaggctgaatggggtcccccgactctggctttcccccaggtctacatgttcttagt

SEQ ID NO: 20935 - RNA, 73 nt, synthetic construct
  source 1..73: mol_type = other RNA
acagcaaagcctctttggaggctgaatggggtcccccgactctggctttcccccaggtctacatgtttttggt

SEQ ID NO: 20936 - RNA, 73 nt, synthetic construct
  source 1..73: mol_type = other RNA
acagcaaagcctctttggaggctgaatggggtcccccgactctggctttcccccaggtttacatgtttttggt

SEQ ID NO: 20937 - RNA, 73 nt, synthetic construct
  source 1..73: mol_type = other RNA
acagcaaagcctctttggaggctgaatggggtcccccgactctggctttcccccaggtttacatgtttttagt

SEQ ID NO: 20938 - RNA, 73 nt, synthetic construct
  source 1..73: mol_type = other RNA
acagcaaagcctctttggaggctgaatggggtcccccgactctggctttcccccaggtttacatgtttctggt

SEQ ID NO: 20939 - RNA, 73 nt, synthetic construct
  source 1..73: mol_type = other RNA
acagcaaagcctctttggaggctgaatggggtcccccgactctggctttcccccaggtttacatgttcttggt

SEQ ID NO: 20940 - RNA, 73 nt, synthetic construct
  source 1..73: mol_type = other RNA
acagcaaagcctctttggaggctgaatggggtcccccgactctggctttcccccaggtttacatgttcttagt

SEQ ID NO: 20941 - RNA, 73 nt, synthetic construct
  source 1..73: mol_type = other RNA
acagcaaagcctctttggaggctgaatggggtcccccgactctggctttcccccaggtctacatgttcttggt

SEQ ID NO: 20942 - RNA, 73 nt, synthetic construct
  source 1..73: mol_type = other RNA
acagcaaagcctctttggaggctgaatggggtcccccgactctggctttcccccaggtatacatgtttttggt

SEQ ID NO: 20943 - RNA, 73 nt, synthetic construct
  source 1..73: mol_type = other RNA
acagcaaagcctctttggaggctgaatggggtcccccgactctggctttcccccaggtgtacatgtttttggt

SEQ ID NO: 20944 - RNA, 73 nt, synthetic construct
  source 1..73: mol_type = other RNA
acagcaaagcctctttggaggctgaatggggtcccccgactctggctttcccccaggtgtacatgttcttggt

SEQ ID NO: 20945 - RNA, 73 nt, synthetic construct
  source 1..73: mol_type = other RNA
acagcaaagcctctttggaggctgaatggggtcccccgactctggctttcccccaggtgtacatgttcttagt

SEQ ID NO: 20946 - RNA, 73 nt, synthetic construct
  source 1..73: mol_type = other RNA
acagcaaagcctctttggaggctgaatggggtcccccgactctggctttcccccaggtgtacatgttcctggt

SEQ ID NO: 20947 - RNA, 73 nt, synthetic construct
  source 1..73: mol_type = other RNA
acagcaaagcctctttggaggctgaatggggtcccccgactctggctttcccccaggtatacatgtttctggt

SEQ ID NO: 20948 - RNA, 73 nt, synthetic construct
  source 1..73: mol_type = other RNA
acagcaaagcctctttggaggctgaatggggtcccccgactctggctttcccccaggtctacatgtttctggt

SEQ ID NO: 20949 - RNA, 73 nt, synthetic construct
  source 1..73: mol_type = other RNA
acagcaaagcctctttggaggctgaatggggtcccccgactctggctttcccccaggtctacatgtttttagt

SEQ ID NO: 20950 - RNA, 73 nt, synthetic construct
  source 1..73: mol_type = other RNA
acagcaaagcctctttggaggctgaatggggtcccccgactctggctttcccccaggtatacatgttcctggt

SEQ ID NO: 20951 - RNA, 73 nt, synthetic construct
  source 1..73: mol_type = other RNA
acagcaaagcctctttggaggctgaatggggtcccccgactctggctttcccccaggtatacatgttcttagt

SEQ ID NO: 20952 - RNA, 73 nt, synthetic construct
  source 1..73: mol_type = other RNA
acagcaaagcctctttggaggctgaatggggtcccccgactctggctttcccccaggtatacatgttcttggt

SEQ ID NO: 20953 - RNA, 73 nt, synthetic construct
  source 1..73: mol_type = other RNA
acagcaaagcctctttggaggctgaatggggtcccccgactctggctttcccccaggtttacatgttcctggt

SEQ ID NO: 20954 - RNA, 73 nt, synthetic construct
  source 1..73: mol_type = other RNA
acagcaaagcctctttggaggctgaatggggtcccccgactctggctttcccccaggtatacatgtttttagt

SEQ ID NO: 20955 - RNA, 73 nt, synthetic construct
  source 1..73: mol_type = other RNA
acagcaaagcctctttggaggctgaatggggtcccccgactctggctttcccccaggtctacatgttcctggt

SEQ ID NO: 20956 - RNA, 73 nt, synthetic construct
  source 1..73: mol_type = other RNA
acagcaaagcctctttggaggctgaatggggtcccccgactctggctttcccccaggtgtacatgtttctggt

SEQ ID NO: 20957 - RNA, 73 nt, synthetic construct
  source 1..73: mol_type = other RNA
acagcaaagcctctttggaggctgaatggggtcccccgactctggctttcccccaggtgtacatgtttttagt

SEQ ID NO: 20958 - RNA, 74 nt, synthetic construct
  source 1..74: mol_type = other RNA
cacagcaaagcctctttggaggctgaatggggtcccccgactctggctttcccccaggtatacatgttcctggt

SEQ ID NO: 20959 - RNA, 74 nt, synthetic construct
  source 1..74: mol_type = other RNA
cacagcaaagcctctttggaggctgaatggggtcccccgactctggctttcccccaggtatacatgtttctggt

SEQ ID NO: 20960 - RNA, 74 nt, synthetic construct
  source 1..74: mol_type = other RNA
cacagcaaagcctctttggaggctgaatggggtcccccgactctggctttcccccaggtctacatgtttttggt

SEQ ID NO: 20961 - RNA, 74 nt, synthetic construct
  source 1..74: mol_type = other RNA
cacagcaaagcctctttggaggctgaatggggtcccccgactctggctttcccccaggtgtacatgttcctggt

SEQ ID NO: 20962 - RNA, 74 nt, synthetic construct
  source 1..74: mol_type = other RNA
cacagcaaagcctctttggaggctgaatggggtcccccgactctggctttcccccaggtatacatgtttttagt

SEQ ID NO: 20963 - RNA, 74 nt, synthetic construct
  source 1..74: mol_type = other RNA
cacagcaaagcctctttggaggctgaatggggtcccccgactctggctttcccccaggtctacatgtttctggt

SEQ ID NO: 20964 - RNA, 74 nt, synthetic construct
  source 1..74: mol_type = other RNA
cacagcaaagcctctttggaggctgaatggggtcccccgactctggctttcccccaggtgtacatgttcttagt

SEQ ID NO: 20965 - RNA, 74 nt, synthetic construct
  source 1..74: mol_type = other RNA
cacagcaaagcctctttggaggctgaatggggtcccccgactctggctttcccccaggtctacatgttcttggt

SEQ ID NO: 20966 - RNA, 74 nt, synthetic construct
  source 1..74: mol_type = other RNA
cacagcaaagcctctttggaggctgaatggggtcccccgactctggctttcccccaggtgtacatgtttttggt

SEQ ID NO: 20967 - RNA, 74 nt, synthetic construct
  source 1..74: mol_type = other RNA
cacagcaaagcctctttggaggctgaatggggtcccccgactctggctttcccccaggtctacatgtttttagt

SEQ ID NO: 20968 - RNA, 74 nt, synthetic construct
  source 1..74: mol_type = other RNA
cacagcaaagcctctttggaggctgaatggggtcccccgactctggctttcccccaggtctacatgttcctggt

SEQ ID NO: 20969 - RNA, 74 nt, synthetic construct
  source 1..74: mol_type = other RNA
cacagcaaagcctctttggaggctgaatggggtcccccgactctggctttcccccaggtctacatgttcttagt

SEQ ID NO: 20970 - RNA, 74 nt, synthetic construct
  source 1..74: mol_type = other RNA
cacagcaaagcctctttggaggctgaatggggtcccccgactctggctttcccccaggtatacatgttcttggt

SEQ ID NO: 20971 - RNA, 74 nt, synthetic construct
  source 1..74: mol_type = other RNA
cacagcaaagcctctttggaggctgaatggggtcccccgactctggctttcccccaggtatacatgtttttggt

SEQ ID NO: 20972 - RNA, 74 nt, synthetic construct
  source 1..74: mol_type = other RNA
cacagcaaagcctctttggaggctgaatggggtcccccgactctggctttcccccaggtatacatgttcttagt

SEQ ID NO: 20973 - RNA, 74 nt, synthetic construct
  source 1..74: mol_type = other RNA
cacagcaaagcctctttggaggctgaatggggtcccccgactctggctttcccccaggtttacatgtttttggt

SEQ ID NO: 20974 - RNA, 74 nt, synthetic construct
  source 1..74: mol_type = other RNA
cacagcaaagcctctttggaggctgaatggggtcccccgactctggctttcccccaggtttacatgttcttggt

SEQ ID NO: 20975 - RNA, 74 nt, synthetic construct
  source 1..74: mol_type = other RNA
cacagcaaagcctctttggaggctgaatggggtcccccgactctggctttcccccaggtttacatgtttttagt

SEQ ID NO: 20976 - RNA, 74 nt, synthetic construct
  source 1..74: mol_type = other RNA
cacagcaaagcctctttggaggctgaatggggtcccccgactctggctttcccccaggtttacatgttcctggt

SEQ ID NO: 20977 - RNA, 74 nt, synthetic construct
  source 1..74: mol_type = other RNA
cacagcaaagcctctttggaggctgaatggggtcccccgactctggctttcccccaggtgtacatgtttttagt

SEQ ID NO: 20978 - RNA, 74 nt, synthetic construct
  source 1..74: mol_type = other RNA
cacagcaaagcctctttggaggctgaatggggtcccccgactctggctttcccccaggtgtacatgtttctggt

SEQ ID NO: 20979 - RNA, 74 nt, synthetic construct
  source 1..74: mol_type = other RNA
cacagcaaagcctctttggaggctgaatggggtcccccgactctggctttcccccaggtgtacatgttcttggt

SEQ ID NO: 20980 - RNA, 74 nt, synthetic construct
  source 1..74: mol_type = other RNA
cacagcaaagcctctttggaggctgaatggggtcccccgactctggctttcccccaggtttacatgtttctggt

SEQ ID NO: 20981 - RNA, 74 nt, synthetic construct
  source 1..74: mol_type = other RNA
cacagcaaagcctctttggaggctgaatggggtcccccgactctggctttcccccaggtttacatgttcttagt

SEQ ID NO: 20982 - RNA, 75 nt, synthetic construct
  source 1..75: mol_type = other RNA
acacagcaaagcctctttggaggctgaatggggtcccccgactctggctttcccccaggtatacatgttcttagt

SEQ ID NO: 20983 - RNA, 75 nt, synthetic construct
  source 1..75: mol_type = other RNA
acacagcaaagcctctttggaggctgaatggggtcccccgactctggctttcccccaggtctacatgttcttagt

SEQ ID NO: 20984 - RNA, 75 nt, synthetic construct
  source 1..75: mol_type = other RNA
acacagcaaagcctctttggaggctgaatggggtcccccgactctggctttcccccaggtctacatgttcctggt

SEQ ID NO: 20985 - RNA, 75 nt, synthetic construct
  source 1..75: mol_type = other RNA
acacagcaaagcctctttggaggctgaatggggtcccccgactctggctttcccccaggtatacatgtttttggt

SEQ ID NO: 20986 - RNA, 75 nt, synthetic construct
  source 1..75: mol_type = other RNA
acacagcaaagcctctttggaggctgaatggggtcccccgactctggctttcccccaggtatacatgtttttagt

SEQ ID NO: 20987 - RNA, 75 nt, synthetic construct
  source 1..75: mol_type = other RNA
acacagcaaagcctctttggaggctgaatggggtcccccgactctggctttcccccaggtatacatgtttctggt

SEQ ID NO: 20988 - RNA, 75 nt, synthetic construct
  source 1..75: mol_type = other RNA
acacagcaaagcctctttggaggctgaatggggtcccccgactctggctttcccccaggtatacatgttcttggt

SEQ ID NO: 20989 - RNA, 75 nt, synthetic construct
  source 1..75: mol_type = other RNA
acacagcaaagcctctttggaggctgaatggggtcccccgactctggctttcccccaggtgtacatgtttctggt

SEQ ID NO: 20990 - RNA, 75 nt, synthetic construct
  source 1..75: mol_type = other RNA
acacagcaaagcctctttggaggctgaatggggtcccccgactctggctttcccccaggtttacatgtttttagt

SEQ ID NO: 20991 - RNA, 75 nt, synthetic construct
  source 1..75: mol_type = other RNA
acacagcaaagcctctttggaggctgaatggggtcccccgactctggctttcccccaggtatacatgttcctggt

SEQ ID NO: 20992 - RNA, 75 nt, synthetic construct
  source 1..75: mol_type = other RNA
acacagcaaagcctctttggaggctgaatggggtcccccgactctggctttcccccaggtctacatgtttttagt

SEQ ID NO: 20993 - RNA, 75 nt, synthetic construct
  source 1..75: mol_type = other RNA
acacagcaaagcctctttggaggctgaatggggtcccccgactctggctttcccccaggtgtacatgttcttagt

SEQ ID NO: 20994 - RNA, 75 nt, synthetic construct
  source 1..75: mol_type = other RNA
acacagcaaagcctctttggaggctgaatggggtcccccgactctggctttcccccaggtttacatgtttttggt

SEQ ID NO: 20995 - RNA, 75 nt, synthetic construct
  source 1..75: mol_type = other RNA
acacagcaaagcctctttggaggctgaatggggtcccccgactctggctttcccccaggtctacatgtttctggt

SEQ ID NO: 20996 - RNA, 75 nt, synthetic construct
  source 1..75: mol_type = other RNA
acacagcaaagcctctttggaggctgaatggggtcccccgactctggctttcccccaggtctacatgttcttggt

SEQ ID NO: 20997 - RNA, 75 nt, synthetic construct
  source 1..75: mol_type = other RNA
acacagcaaagcctctttggaggctgaatggggtcccccgactctggctttcccccaggtttacatgttcctggt

SEQ ID NO: 20998 - RNA, 75 nt, synthetic construct
  source 1..75: mol_type = other RNA
acacagcaaagcctctttggaggctgaatggggtcccccgactctggctttcccccaggtttacatgttcttggt

SEQ ID NO: 20999 - RNA, 75 nt, synthetic construct
  source 1..75: mol_type = other RNA
acacagcaaagcctctttggaggctgaatggggtcccccgactctggctttcccccaggtttacatgtttctggt

SEQ ID NO: 21000 - RNA, 75 nt, synthetic construct
  source 1..75: mol_type = other RNA
acacagcaaagcctctttggaggctgaatggggtcccccgactctggctttcccccaggtctacatgtttttggt

SEQ ID NO: 21001 - RNA, 75 nt, synthetic construct
  source 1..75: mol_type = other RNA
acacagcaaagcctctttggaggctgaatggggtcccccgactctggctttcccccaggtgtacatgtttttggt

SEQ ID NO: 21002 - RNA, 75 nt, synthetic construct
  source 1..75: mol_type = other RNA
acacagcaaagcctctttggaggctgaatggggtcccccgactctggctttcccccaggtgtacatgttcctggt

SEQ ID NO: 21003 - RNA, 75 nt, synthetic construct
  source 1..75: mol_type = other RNA
acacagcaaagcctctttggaggctgaatggggtcccccgactctggctttcccccaggtgtacatgtttttagt

SEQ ID NO: 21004 - RNA, 75 nt, synthetic construct
  source 1..75: mol_type = other RNA
acacagcaaagcctctttggaggctgaatggggtcccccgactctggctttcccccaggtttacatgttcttagt

SEQ ID NO: 21005 - RNA, 75 nt, synthetic construct
  source 1..75: mol_type = other RNA
acacagcaaagcctctttggaggctgaatggggtcccccgactctggctttcccccaggtgtacatgttcttggt

SEQ ID NO: 21006 - RNA, 76 nt, synthetic construct
  source 1..76: mol_type = other RNA
cacacagcaaagcctctttggaggctgaatggggtcccccgactctggctttcccccaggtgtacatgttcctggt

SEQ ID NO: 21007 - RNA, 76 nt, synthetic construct
  source 1..76: mol_type = other RNA
cacacagcaaagcctctttggaggctgaatggggtcccccgactctggctttcccccaggtttacatgttcttagt

SEQ ID NO: 21008 - RNA, 76 nt, synthetic construct
  source 1..76: mol_type = other RNA
cacacagcaaagcctctttggaggctgaatggggtcccccgactctggctttcccccaggtttacatgttcttggt

SEQ ID NO: 21009 - RNA, 76 nt, synthetic construct
  source 1..76: mol_type = other RNA
cacacagcaaagcctctttggaggctgaatggggtcccccgactctggctttcccccaggtttacatgtttctggt

SEQ ID NO: 21010 - RNA, 76 nt, synthetic construct
  source 1..76: mol_type = other RNA
cacacagcaaagcctctttggaggctgaatggggtcccccgactctggctttcccccaggtgtacatgttcttggt

SEQ ID NO: 21011 - RNA, 76 nt, synthetic construct
  source 1..76: mol_type = other RNA
cacacagcaaagcctctttggaggctgaatggggtcccccgactctggctttcccccaggtttacatgtttttggt

SEQ ID NO: 21012 - RNA, 76 nt, synthetic construct
  source 1..76: mol_type = other RNA
cacacagcaaagcctctttggaggctgaatggggtcccccgactctggctttcccccaggtctacatgtttttggt

SEQ ID NO: 21013 - RNA, 76 nt, synthetic construct
  source 1..76: mol_type = other RNA
cacacagcaaagcctctttggaggctgaatggggtcccccgactctggctttcccccaggtctacatgtttctggt

SEQ ID NO: 21014 - RNA, 76 nt, synthetic construct
  source 1..76: mol_type = other RNA
cacacagcaaagcctctttggaggctgaatggggtcccccgactctggctttcccccaggtgtacatgtttttggt

SEQ ID NO: 21015 - RNA, 76 nt, synthetic construct
  source 1..76: mol_type = other RNA
cacacagcaaagcctctttggaggctgaatggggtcccccgactctggctttcccccaggtttacatgttcctggt

SEQ ID NO: 21016 - RNA, 76 nt, synthetic construct
  source 1..76: mol_type = other RNA
cacacagcaaagcctctttggaggctgaatggggtcccccgactctggctttcccccaggtgtacatgtttttagt

SEQ ID NO: 21017 - RNA, 76 nt, synthetic construct
  source 1..76: mol_type = other RNA
cacacagcaaagcctctttggaggctgaatggggtcccccgactctggctttcccccaggtctacatgttcctggt

SEQ ID NO: 21018 - RNA, 76 nt, synthetic construct
  source 1..76: mol_type = other RNA
cacacagcaaagcctctttggaggctgaatggggtcccccgactctggctttcccccaggtatacatgttcttagt

SEQ ID NO: 21019 - RNA, 76 nt, synthetic construct
  source 1..76: mol_type = other RNA
cacacagcaaagcctctttggaggctgaatggggtcccccgactctggctttcccccaggtctacatgttcttggt

SEQ ID NO: 21020 - RNA, 76 nt, synthetic construct
  source 1..76: mol_type = other RNA
cacacagcaaagcctctttggaggctgaatggggtcccccgactctggctttcccccaggtctacatgttcttagt

SEQ ID NO: 21021 - RNA, 76 nt, synthetic construct
  source 1..76: mol_type = other RNA
cacacagcaaagcctctttggaggctgaatggggtcccccgactctggctttcccccaggtttacatgtttttagt

SEQ ID NO: 21022 - RNA, 76 nt, synthetic construct
  source 1..76: mol_type = other RNA
cacacagcaaagcctctttggaggctgaatggggtcccccgactctggctttcccccaggtatacatgttcctggt

SEQ ID NO: 21023 - RNA, 76 nt, synthetic construct
  source 1..76: mol_type = other RNA
cacacagcaaagcctctttggaggctgaatggggtcccccgactctggctttcccccaggtatacatgttcttggt

SEQ ID NO: 21024 - RNA, 76 nt, synthetic construct
  source 1..76: mol_type = other RNA
cacacagcaaagcctctttggaggctgaatggggtcccccgactctggctttcccccaggtatacatgtttctggt

SEQ ID NO: 21025 - RNA, 76 nt, synthetic construct
  source 1..76: mol_type = other RNA
cacacagcaaagcctctttggaggctgaatggggtcccccgactctggctttcccccaggtatacatgtttttggt

SEQ ID NO: 21026 - RNA, 76 nt, synthetic construct
  source 1..76: mol_type = other RNA
cacacagcaaagcctctttggaggctgaatggggtcccccgactctggctttcccccaggtctacatgtttttagt

SEQ ID NO: 21027 - RNA, 76 nt, synthetic construct
  source 1..76: mol_type = other RNA
cacacagcaaagcctctttggaggctgaatggggtcccccgactctggctttcccccaggtgtacatgtttctggt

SEQ ID NO: 21028 - RNA, 76 nt, synthetic construct
  source 1..76: mol_type = other RNA
cacacagcaaagcctctttggaggctgaatggggtcccccgactctggctttcccccaggtgtacatgttcttagt

SEQ ID NO: 21029 - RNA, 76 nt, synthetic construct
  source 1..76: mol_type = other RNA
cacacagcaaagcctctttggaggctgaatggggtcccccgactctggctttcccccaggtatacatgtttttagt

SEQ ID NO: 21030 - RNA, 77 nt, synthetic construct
  source 1..77: mol_type = other RNA
gcacacagcaaagcctctttggaggctgaatggggtcccccgactctggctttcccccaggtctacatgtttttggt

SEQ ID NO: 21031 - RNA, 77 nt, synthetic construct
  source 1..77: mol_type = other RNA
gcacacagcaaagcctctttggaggctgaatggggtcccccgactctggctttcccccaggtatacatgttcttagt

SEQ ID NO: 21032 - RNA, 77 nt, synthetic construct
  source 1..77: mol_type = other RNA
gcacacagcaaagcctctttggaggctgaatggggtcccccgactctggctttcccccaggtatacatgttcttggt

SEQ ID NO: 21033 - RNA, 77 nt, synthetic construct
  source 1..77: mol_type = other RNA
gcacacagcaaagcctctttggaggctgaatggggtcccccgactctggctttcccccaggtgtacatgtttctggt

SEQ ID NO: 21034 - RNA, 77 nt, synthetic construct
  source 1..77: mol_type = other RNA
gcacacagcaaagcctctttggaggctgaatggggtcccccgactctggctttcccccaggtttacatgttcttagt

SEQ ID NO: 21035 - RNA, 77 nt, synthetic construct
  source 1..77: mol_type = other RNA
gcacacagcaaagcctctttggaggctgaatggggtcccccgactctggctttcccccaggtttacatgtttctggt

SEQ ID NO: 21036 - RNA, 77 nt, synthetic construct
  source 1..77: mol_type = other RNA
gcacacagcaaagcctctttggaggctgaatggggtcccccgactctggctttcccccaggtatacatgttcctggt

SEQ ID NO: 21037 - RNA, 77 nt, synthetic construct
  source 1..77: mol_type = other RNA
gcacacagcaaagcctctttggaggctgaatggggtcccccgactctggctttcccccaggtttacatgttcttggt

SEQ ID NO: 21038 - RNA, 77 nt, synthetic construct
  source 1..77: mol_type = other RNA
gcacacagcaaagcctctttggaggctgaatggggtcccccgactctggctttcccccaggtttacatgtttttggt

SEQ ID NO: 21039 - RNA, 77 nt, synthetic construct
  source 1..77: mol_type = other RNA
gcacacagcaaagcctctttggaggctgaatggggtcccccgactctggctttcccccaggtttacatgtttttagt

SEQ ID NO: 21040 - RNA, 77 nt, synthetic construct
  source 1..77: mol_type = other RNA
gcacacagcaaagcctctttggaggctgaatggggtcccccgactctggctttcccccaggtatacatgtttctggt

SEQ ID NO: 21041 - RNA, 77 nt, synthetic construct
  source 1..77: mol_type = other RNA
gcacacagcaaagcctctttggaggctgaatggggtcccccgactctggctttcccccaggtatacatgtttttagt

SEQ ID NO: 21042 - RNA, 77 nt, synthetic construct
  source 1..77: mol_type = other RNA
gcacacagcaaagcctctttggaggctgaatggggtcccccgactctggctttcccccaggtatacatgtttttggt

SEQ ID NO: 21043 - RNA, 77 nt, synthetic construct
  source 1..77: mol_type = other RNA
gcacacagcaaagcctctttggaggctgaatggggtcccccgactctggctttcccccaggtctacatgttcctggt

SEQ ID NO: 21044 - RNA, 77 nt, synthetic construct
  source 1..77: mol_type = other RNA
gcacacagcaaagcctctttggaggctgaatggggtcccccgactctggctttcccccaggtctacatgttcttagt

SEQ ID NO: 21045 - RNA, 77 nt, synthetic construct
  source 1..77: mol_type = other RNA
gcacacagcaaagcctctttggaggctgaatggggtcccccgactctggctttcccccaggtctacatgttcttggt

SEQ ID NO: 21046 - RNA, 77 nt, synthetic construct
  source 1..77: mol_type = other RNA
gcacacagcaaagcctctttggaggctgaatggggtcccccgactctggctttcccccaggtctacatgtttctggt

SEQ ID NO: 21047 - RNA, 77 nt, synthetic construct
  source 1..77: mol_type = other RNA
gcacacagcaaagcctctttggaggctgaatggggtcccccgactctggctttcccccaggtgtacatgttcctggt

SEQ ID NO: 21048 - RNA, 77 nt, synthetic construct
  source 1..77: mol_type = other RNA
gcacacagcaaagcctctttggaggctgaatggggtcccccgactctggctttcccccaggtgtacatgttcttagt

SEQ ID NO: 21049 - RNA, 77 nt, synthetic construct
  source 1..77: mol_type = other RNA
gcacacagcaaagcctctttggaggctgaatggggtcccccgactctggctttcccccaggtgtacatgttcttggt

SEQ ID NO: 21050 - RNA, 77 nt, synthetic construct
  source 1..77: mol_type = other RNA
gcacacagcaaagcctctttggaggctgaatggggtcccccgactctggctttcccccaggtgtacatgtttttagt

SEQ ID NO: 21051 - RNA, 77 nt, synthetic construct
  source 1..77: mol_type = other RNA
gcacacagcaaagcctctttggaggctgaatggggtcccccgactctggctttcccccaggtgtacatgtttttggt

SEQ ID NO: 21052 - RNA, 77 nt, synthetic construct
  source 1..77: mol_type = other RNA
gcacacagcaaagcctctttggaggctgaatggggtcccccgactctggctttcccccaggtttacatgttcctggt

SEQ ID NO: 21053 - RNA, 77 nt, synthetic construct
  source 1..77: mol_type = other RNA
gcacacagcaaagcctctttggaggctgaatggggtcccccgactctggctttcccccaggtctacatgtttttagt

SEQ ID NO: 21054 - RNA, 78 nt, synthetic construct
  source 1..78: mol_type = other RNA
tgcacacagcaaagcctctttggaggctgaatggggtcccccgactctggctttcccccaggtctacatgtttctggt

SEQ ID NO: 21055 - RNA, 78 nt, synthetic construct
  source 1..78: mol_type = other RNA
tgcacacagcaaagcctctttggaggctgaatggggtcccccgactctggctttcccccaggtgtacatgttcttagt

SEQ ID NO: 21056 - RNA, 78 nt, synthetic construct
  source 1..78: mol_type = other RNA
tgcacacagcaaagcctctttggaggctgaatggggtcccccgactctggctttcccccaggtgtacatgttcttggt

SEQ ID NO: 21057 - RNA, 78 nt, synthetic construct
  source 1..78: mol_type = other RNA
tgcacacagcaaagcctctttggaggctgaatggggtcccccgactctggctttcccccaggtttacatgttcttagt

SEQ ID NO: 21058 - RNA, 78 nt, synthetic construct
  source 1..78: mol_type = other RNA
tgcacacagcaaagcctctttggaggctgaatggggtcccccgactctggctttcccccaggtgtacatgtttttagt

SEQ ID NO: 21059 - RNA, 78 nt, synthetic construct
  source 1..78: mol_type = other RNA
tgcacacagcaaagcctctttggaggctgaatggggtcccccgactctggctttcccccaggtgtacatgtttttggt

SEQ ID NO: 21060 - RNA, 78 nt, synthetic construct
  source 1..78: mol_type = other RNA
tgcacacagcaaagcctctttggaggctgaatggggtcccccgactctggctttcccccaggtttacatgttcctggt

SEQ ID NO: 21061 - RNA, 78 nt, synthetic construct
  source 1..78: mol_type = other RNA
tgcacacagcaaagcctctttggaggctgaatggggtcccccgactctggctttcccccaggtgtacatgttcctggt

SEQ ID NO: 21062 - RNA, 78 nt, synthetic construct
  source 1..78: mol_type = other RNA
tgcacacagcaaagcctctttggaggctgaatggggtcccccgactctggctttcccccaggtgtacatgtttctggt

SEQ ID NO: 21063 - RNA, 78 nt, synthetic construct
  source 1..78: mol_type = other RNA
tgcacacagcaaagcctctttggaggctgaatggggtcccccgactctggctttcccccaggtctacatgtttttggt

SEQ ID NO: 21064 - RNA, 78 nt, synthetic construct
  source 1..78: mol_type = other RNA
tgcacacagcaaagcctctttggaggctgaatggggtcccccgactctggctttcccccaggtctacatgttcctggt

SEQ ID NO: 21065 - RNA, 78 nt, synthetic construct
  source 1..78: mol_type = other RNA
tgcacacagcaaagcctctttggaggctgaatggggtcccccgactctggctttcccccaggtctacatgttcttagt

SEQ ID NO: 21066 - RNA, 78 nt, synthetic construct
  source 1..78: mol_type = other RNA
tgcacacagcaaagcctctttggaggctgaatggggtcccccgactctggctttcccccaggtctacatgttcttggt

SEQ ID NO: 21067 - RNA, 78 nt, synthetic construct
  source 1..78: mol_type = other RNA
tgcacacagcaaagcctctttggaggctgaatggggtcccccgactctggctttcccccaggtatacatgtttttggt

SEQ ID NO: 21068 - RNA, 78 nt, synthetic construct
  source 1..78: mol_type = other RNA
tgcacacagcaaagcctctttggaggctgaatggggtcccccgactctggctttcccccaggtatacatgtttttagt

SEQ ID NO: 21069 - RNA, 78 nt, synthetic construct
  source 1..78: mol_type = other RNA
tgcacacagcaaagcctctttggaggctgaatggggtcccccgactctggctttcccccaggtatacatgtttctggt

SEQ ID NO: 21070 - RNA, 78 nt, synthetic construct
  source 1..78: mol_type = other RNA
tgcacacagcaaagcctctttggaggctgaatggggtcccccgactctggctttcccccaggtatacatgttcttagt

SEQ ID NO: 21071 - RNA, 78 nt, synthetic construct
  source 1..78: mol_type = other RNA
tgcacacagcaaagcctctttggaggctgaatggggtcccccgactctggctttcccccaggtctacatgtttttagt

SEQ ID NO: 21072 - RNA, 78 nt, synthetic construct
  source 1..78: mol_type = other RNA
tgcacacagcaaagcctctttggaggctgaatggggtcccccgactctggctttcccccaggtatacatgttcctggt

SEQ ID NO: 21073 - RNA, 78 nt, synthetic construct
  source 1..78: mol_type = other RNA
tgcacacagcaaagcctctttggaggctgaatggggtcccccgactctggctttcccccaggtttacatgtttctggt

SEQ ID NO: 21074 - RNA, 78 nt, synthetic construct
  source 1..78: mol_type = other RNA
tgcacacagcaaagcctctttggaggctgaatggggtcccccgactctggctttcccccaggtttacatgtttttggt

SEQ ID NO: 21075 - RNA, 78 nt, synthetic construct
  source 1..78: mol_type = other RNA
tgcacacagcaaagcctctttggaggctgaatggggtcccccgactctggctttcccccaggtttacatgtttttagt

SEQ ID NO: 21076 - RNA, 78 nt, synthetic construct
  source 1..78: mol_type = other RNA
tgcacacagcaaagcctctttggaggctgaatggggtcccccgactctggctttcccccaggtatacatgttcttggt

SEQ ID NO: 21077 - RNA, 78 nt, synthetic construct
  source 1..78: mol_type = other RNA
tgcacacagcaaagcctctttggaggctgaatggggtcccccgactctggctttcccccaggtttacatgttcttggt

SEQ ID NO: 21078 - RNA, 79 nt, synthetic construct
  source 1..79: mol_type = other RNA
gtgcacacagcaaagcctctttggaggctgaatggggtcccccgactctggctttcccccaggtttacatgtttttggt

SEQ ID NO: 21079 - RNA, 79 nt, synthetic construct
  source 1..79: mol_type = other RNA
gtgcacacagcaaagcctctttggaggctgaatggggtcccccgactctggctttcccccaggtttacatgttcttagt

SEQ ID NO: 21080 - RNA, 79 nt, synthetic construct
  source 1..79: mol_type = other RNA
gtgcacacagcaaagcctctttggaggctgaatggggtcccccgactctggctttcccccaggtttacatgttcttggt

SEQ ID NO: 21081 - RNA, 79 nt, synthetic construct
  source 1..79: mol_type = other RNA
gtgcacacagcaaagcctctttggaggctgaatggggtcccccgactctggctttcccccaggtttacatgtttctggt

SEQ ID NO: 21082 - RNA, 79 nt, synthetic construct
  source 1..79: mol_type = other RNA
gtgcacacagcaaagcctctttggaggctgaatggggtcccccgactctggctttcccccaggtttacatgtttttagt

SEQ ID NO: 21083 - RNA, 79 nt, synthetic construct
  source 1..79: mol_type = other RNA
gtgcacacagcaaagcctctttggaggctgaatggggtcccccgactctggctttcccccaggtgtacatgttcctggt

SEQ ID NO: 21084 - RNA, 79 nt, synthetic construct
  source 1..79: mol_type = other RNA
gtgcacacagcaaagcctctttggaggctgaatggggtcccccgactctggctttcccccaggtgtacatgttcttagt

SEQ ID NO: 21085 - RNA, 79 nt, synthetic construct
  source 1..79: mol_type = other RNA
gtgcacacagcaaagcctctttggaggctgaatggggtcccccgactctggctttcccccaggtttacatgttcctggt

SEQ ID NO: 21086 - RNA, 79 nt, synthetic construct
  source 1..79: mol_type = other RNA
gtgcacacagcaaagcctctttggaggctgaatggggtcccccgactctggctttcccccaggtctacatgtttttagt

SEQ ID NO: 21087 - RNA, 79 nt, synthetic construct
  source 1..79: mol_type = other RNA
gtgcacacagcaaagcctctttggaggctgaatggggtcccccgactctggctttcccccaggtatacatgttcttagt

SEQ ID NO: 21088 - RNA, 79 nt, synthetic construct
  source 1..79: mol_type = other RNA
gtgcacacagcaaagcctctttggaggctgaatggggtcccccgactctggctttcccccaggtctacatgtttctggt

SEQ ID NO: 21089 - RNA, 79 nt, synthetic construct
  source 1..79: mol_type = other RNA
gtgcacacagcaaagcctctttggaggctgaatggggtcccccgactctggctttcccccaggtctacatgttcttagt

SEQ ID NO: 21090 - RNA, 79 nt, synthetic construct
  source 1..79: mol_type = other RNA
gtgcacacagcaaagcctctttggaggctgaatggggtcccccgactctggctttcccccaggtctacatgtttttggt

SEQ ID NO: 21091 - RNA, 79 nt, synthetic construct
  source 1..79: mol_type = other RNA
gtgcacacagcaaagcctctttggaggctgaatggggtcccccgactctggctttcccccaggtatacatgttcctggt

SEQ ID NO: 21092 - RNA, 79 nt, synthetic construct
  source 1..79: mol_type = other RNA
gtgcacacagcaaagcctctttggaggctgaatggggtcccccgactctggctttcccccaggtgtacatgtttttggt

SEQ ID NO: 21093 - RNA, 79 nt, synthetic construct
  source 1..79: mol_type = other RNA
gtgcacacagcaaagcctctttggaggctgaatggggtcccccgactctggctttcccccaggtatacatgtttttagt

SEQ ID NO: 21094 - RNA, 79 nt, synthetic construct
  source 1..79: mol_type = other RNA
gtgcacacagcaaagcctctttggaggctgaatggggtcccccgactctggctttcccccaggtatacatgtttttggt

SEQ ID NO: 21095 - RNA, 79 nt, synthetic construct
  source 1..79: mol_type = other RNA
gtgcacacagcaaagcctctttggaggctgaatggggtcccccgactctggctttcccccaggtctacatgttcctggt

SEQ ID NO: 21096 - RNA, 79 nt, synthetic construct
  source 1..79: mol_type = other RNA
gtgcacacagcaaagcctctttggaggctgaatggggtcccccgactctggctttcccccaggtctacatgttcttggt

SEQ ID NO: 21097 - RNA, 79 nt, synthetic construct
  source 1..79: mol_type = other RNA
gtgcacacagcaaagcctctttggaggctgaatggggtcccccgactctggctttcccccaggtatacatgtttctggt

SEQ ID NO: 21098 - RNA, 79 nt, synthetic construct
  source 1..79: mol_type = other RNA
gtgcacacagcaaagcctctttggaggctgaatggggtcccccgactctggctttcccccaggtatacatgttcttggt

SEQ ID NO: 21099 - RNA, 79 nt, synthetic construct
  source 1..79: mol_type = other RNA
gtgcacacagcaaagcctctttggaggctgaatggggtcccccgactctggctttcccccaggtgtacatgtttttagt

SEQ ID NO: 21100 - RNA, 79 nt, synthetic construct
  source 1..79: mol_type = other RNA
gtgcacacagcaaagcctctttggaggctgaatggggtcccccgactctggctttcccccaggtgtacatgttcttggt

SEQ ID NO: 21101 - RNA, 79 nt, synthetic construct
  source 1..79: mol_type = other RNA
gtgcacacagcaaagcctctttggaggctgaatggggtcccccgactctggctttcccccaggtgtacatgtttctggt

SEQ ID NO: 21102 - RNA, 80 nt, synthetic construct
  source 1..80: mol_type = other RNA
ggtgcacacagcaaagcctctttggaggctgaatggggtcccccgactctggctttcccccaggtgtacatgttcttggt

SEQ ID NO: 21103 - RNA, 80 nt, synthetic construct
  source 1..80: mol_type = other RNA
ggtgcacacagcaaagcctctttggaggctgaatggggtcccccgactctggctttcccccaggtctacatgtttttagt

SEQ ID NO: 21104 - RNA, 80 nt, synthetic construct
  source 1..80: mol_type = other RNA
ggtgcacacagcaaagcctctttggaggctgaatggggtcccccgactctggctttcccccaggtgtacatgtttttggt

SEQ ID NO: 21105 - RNA, 80 nt, synthetic construct
  source 1..80: mol_type = other RNA
ggtgcacacagcaaagcctctttggaggctgaatggggtcccccgactctggctttcccccaggtttacatgtttttggt

SEQ ID NO: 21106 - RNA, 80 nt, synthetic construct
  source 1..80: mol_type = other RNA
ggtgcacacagcaaagcctctttggaggctgaatggggtcccccgactctggctttcccccaggtttacatgtttttagt

SEQ ID NO: 21107 - RNA, 80 nt, synthetic construct
  source 1..80: mol_type = other RNA
ggtgcacacagcaaagcctctttggaggctgaatggggtcccccgactctggctttcccccaggtttacatgtttctggt

SEQ ID NO: 21108 - RNA, 80 nt, synthetic construct
  source 1..80: mol_type = other RNA
ggtgcacacagcaaagcctctttggaggctgaatggggtcccccgactctggctttcccccaggtttacatgttcttggt

SEQ ID NO: 21109 - RNA, 80 nt, synthetic construct
  source 1..80: mol_type = other RNA
ggtgcacacagcaaagcctctttggaggctgaatggggtcccccgactctggctttcccccaggtttacatgttcttagt

SEQ ID NO: 21110 - RNA, 80 nt, synthetic construct
  source 1..80: mol_type = other RNA
ggtgcacacagcaaagcctctttggaggctgaatggggtcccccgactctggctttcccccaggtttacatgttcctggt

SEQ ID NO: 21111 - RNA, 80 nt, synthetic construct
  source 1..80: mol_type = other RNA
ggtgcacacagcaaagcctctttggaggctgaatggggtcccccgactctggctttcccccaggtgtacatgtttctggt

SEQ ID NO: 21112 - RNA, 80 nt, synthetic construct
  source 1..80: mol_type = other RNA
ggtgcacacagcaaagcctctttggaggctgaatggggtcccccgactctggctttcccccaggtctacatgtttctggt

SEQ ID NO: 21113 - RNA, 80 nt, synthetic construct
  source 1..80: mol_type = other RNA
ggtgcacacagcaaagcctctttggaggctgaatggggtcccccgactctggctttcccccaggtgtacatgttcctggt

SEQ ID NO: 21114 - RNA, 80 nt, synthetic construct
  source 1..80: mol_type = other RNA
ggtgcacacagcaaagcctctttggaggctgaatggggtcccccgactctggctttcccccaggtgtacatgttcttagt

SEQ ID NO: 21115 - RNA, 80 nt, synthetic construct
  source 1..80: mol_type = other RNA
ggtgcacacagcaaagcctctttggaggctgaatggggtcccccgactctggctttcccccaggtctacatgttcttggt

SEQ ID NO: 21116 - RNA, 80 nt, synthetic construct
  source 1..80: mol_type = other RNA
ggtgcacacagcaaagcctctttggaggctgaatggggtcccccgactctggctttcccccaggtctacatgttcttagt

SEQ ID NO: 21117 - RNA, 80 nt, synthetic construct
  source 1..80: mol_type = other RNA
ggtgcacacagcaaagcctctttggaggctgaatggggtcccccgactctggctttcccccaggtctacatgttcctggt

SEQ ID NO: 21118 - RNA, 80 nt, synthetic construct
  source 1..80: mol_type = other RNA
ggtgcacacagcaaagcctctttggaggctgaatggggtcccccgactctggctttcccccaggtatacatgtttttggt

SEQ ID NO: 21119 - RNA, 80 nt, synthetic construct
  source 1..80: mol_type = other RNA
ggtgcacacagcaaagcctctttggaggctgaatggggtcccccgactctggctttcccccaggtatacatgtttttagt

SEQ ID NO: 21120 - RNA, 80 nt, synthetic construct
  source 1..80: mol_type = other RNA
ggtgcacacagcaaagcctctttggaggctgaatggggtcccccgactctggctttcccccaggtatacatgtttctggt

SEQ ID NO: 21121 - RNA, 80 nt, synthetic construct
  source 1..80: mol_type = other RNA
ggtgcacacagcaaagcctctttggaggctgaatggggtcccccgactctggctttcccccaggtatacatgttcttggt

SEQ ID NO: 21122 - RNA, 80 nt, synthetic construct
  source 1..80: mol_type = other RNA
ggtgcacacagcaaagcctctttggaggctgaatggggtcccccgactctggctttcccccaggtatacatgttcttagt

SEQ ID NO: 21123 - RNA, 80 nt, synthetic construct
  source 1..80: mol_type = other RNA
ggtgcacacagcaaagcctctttggaggctgaatggggtcccccgactctggctttcccccaggtatacatgttcctggt

SEQ ID NO: 21124 - RNA, 80 nt, synthetic construct
  source 1..80: mol_type = other RNA
ggtgcacacagcaaagcctctttggaggctgaatggggtcccccgactctggctttcccccaggtctacatgtttttggt

SEQ ID NO: 21125 - RNA, 80 nt, synthetic construct
  source 1..80: mol_type = other RNA
ggtgcacacagcaaagcctctttggaggctgaatggggtcccccgactctggctttcccccaggtgtacatgtttttagt

SEQ ID NO: 21126 - RNA, 81 nt, synthetic construct
  source 1..81: mol_type = other RNA
gggtgcacacagcaaagcctctttggaggctgaatggggtcccccgactctggctttcccccaggtgtacatgtttttggt

SEQ ID NO: 21127 - RNA, 81 nt, synthetic construct
  source 1..81: mol_type = other RNA
gggtgcacacagcaaagcctctttggaggctgaatggggtcccccgactctggctttcccccaggtttacatgttcttggt

SEQ ID NO: 21128 - RNA, 81 nt, synthetic construct
  source 1..81: mol_type = other RNA
gggtgcacacagcaaagcctctttggaggctgaatggggtcccccgactctggctttcccccaggtttacatgtttctggt

SEQ ID NO: 21129 - RNA, 81 nt, synthetic construct
  source 1..81: mol_type = other RNA
gggtgcacacagcaaagcctctttggaggctgaatggggtcccccgactctggctttcccccaggtttacatgtttttggt

SEQ ID NO: 21130 - RNA, 81 nt, synthetic construct
  source 1..81: mol_type = other RNA
gggtgcacacagcaaagcctctttggaggctgaatggggtcccccgactctggctttcccccaggtgtacatgttcttagt

SEQ ID NO: 21131 - RNA, 81 nt, synthetic construct
  source 1..81: mol_type = other RNA
gggtgcacacagcaaagcctctttggaggctgaatggggtcccccgactctggctttcccccaggtttacatgttcttagt

SEQ ID NO: 21132 - RNA, 81 nt, synthetic construct
  source 1..81: mol_type = other RNA
gggtgcacacagcaaagcctctttggaggctgaatggggtcccccgactctggctttcccccaggtttacatgttcctggt

SEQ ID NO: 21133 - RNA, 81 nt, synthetic construct
  source 1..81: mol_type = other RNA
gggtgcacacagcaaagcctctttggaggctgaatggggtcccccgactctggctttcccccaggtgtacatgtttttagt

SEQ ID NO: 21134 - RNA, 81 nt, synthetic construct
  source 1..81: mol_type = other RNA
gggtgcacacagcaaagcctctttggaggctgaatggggtcccccgactctggctttcccccaggtatacatgtttttagt

SEQ ID NO: 21135 - RNA, 81 nt, synthetic construct
  source 1..81: mol_type = other RNA
gggtgcacacagcaaagcctctttggaggctgaatggggtcccccgactctggctttcccccaggtgtacatgttcttggt

SEQ ID NO: 21136 - RNA, 81 nt, synthetic construct
  source 1..81: mol_type = other RNA
gggtgcacacagcaaagcctctttggaggctgaatggggtcccccgactctggctttcccccaggtgtacatgtttctggt

SEQ ID NO: 21137 - RNA, 81 nt, synthetic construct
  source 1..81: mol_type = other RNA
gggtgcacacagcaaagcctctttggaggctgaatggggtcccccgactctggctttcccccaggtctacatgttcttggt

SEQ ID NO: 21138 - RNA, 81 nt, synthetic construct
  source 1..81: mol_type = other RNA
gggtgcacacagcaaagcctctttggaggctgaatggggtcccccgactctggctttcccccaggtctacatgttcttagt

SEQ ID NO: 21139 - RNA, 81 nt, synthetic construct
  source 1..81: mol_type = other RNA
gggtgcacacagcaaagcctctttggaggctgaatggggtcccccgactctggctttcccccaggtctacatgttcctggt

SEQ ID NO: 21140 - RNA, 81 nt, synthetic construct
  source 1..81: mol_type = other RNA
gggtgcacacagcaaagcctctttggaggctgaatggggtcccccgactctggctttcccccaggtatacatgttcctggt

SEQ ID NO: 21141 - RNA, 81 nt, synthetic construct
  source 1..81: mol_type = other RNA
gggtgcacacagcaaagcctctttggaggctgaatggggtcccccgactctggctttcccccaggtatacatgtttctggt

SEQ ID NO: 21142 - RNA, 81 nt, synthetic construct
  source 1..81: mol_type = other RNA
gggtgcacacagcaaagcctctttggaggctgaatggggtcccccgactctggctttcccccaggtatacatgttcttggt

SEQ ID NO: 21143 - RNA, 81 nt, synthetic construct
  source 1..81: mol_type = other RNA
gggtgcacacagcaaagcctctttggaggctgaatggggtcccccgactctggctttcccccaggtatacatgttcttagt

SEQ ID NO: 21144 - RNA, 81 nt, synthetic construct
  source 1..81: mol_type = other RNA
gggtgcacacagcaaagcctctttggaggctgaatggggtcccccgactctggctttcccccaggtctacatgtttttggt

SEQ ID NO: 21145 - RNA, 81 nt, synthetic construct
  source 1..81: mol_type = other RNA
gggtgcacacagcaaagcctctttggaggctgaatggggtcccccgactctggctttcccccaggtctacatgtttctggt

SEQ ID NO: 21146 - RNA, 81 nt, synthetic construct
  source 1..81: mol_type = other RNA
gggtgcacacagcaaagcctctttggaggctgaatggggtcccccgactctggctttcccccaggtctacatgtttttagt

SEQ ID NO: 21147 - RNA, 81 nt, synthetic construct
  source 1..81: mol_type = other RNA
gggtgcacacagcaaagcctctttggaggctgaatggggtcccccgactctggctttcccccaggtatacatgtttttggt

SEQ ID NO: 21148 - RNA, 81 nt, synthetic construct
  source 1..81: mol_type = other RNA
gggtgcacacagcaaagcctctttggaggctgaatggggtcccccgactctggctttcccccaggtttacatgtttttagt

SEQ ID NO: 21149 - RNA, 81 nt, synthetic construct
  source 1..81: mol_type = other RNA
gggtgcacacagcaaagcctctttggaggctgaatggggtcccccgactctggctttcccccaggtgtacatgttcctggt

SEQ ID NO: 21150 - RNA, 82 nt, synthetic construct
  source 1..82: mol_type = other RNA
tgggtgcacacagcaaagcctctttggaggctgaatggggtcccccgactctggctttcccccaggtttacatgtttttagt

SEQ ID NO: 21151 - RNA, 82 nt, synthetic construct
  source 1..82: mol_type = other RNA
tgggtgcacacagcaaagcctctttggaggctgaatggggtcccccgactctggctttcccccaggtgtacatgttcctggt

SEQ ID NO: 21152 - RNA, 82 nt, synthetic construct
  source 1..82: mol_type = other RNA
tgggtgcacacagcaaagcctctttggaggctgaatggggtcccccgactctggctttcccccaggtttacatgtttttggt

SEQ ID NO: 21153 - RNA, 82 nt, synthetic construct
  source 1..82: mol_type = other RNA
tgggtgcacacagcaaagcctctttggaggctgaatggggtcccccgactctggctttcccccaggtgtacatgttcttagt

SEQ ID NO: 21154 - RNA, 82 nt, synthetic construct
  source 1..82: mol_type = other RNA
tgggtgcacacagcaaagcctctttggaggctgaatggggtcccccgactctggctttcccccaggtatacatgtttttggt

SEQ ID NO: 21155 - RNA, 82 nt, synthetic construct
  source 1..82: mol_type = other RNA
tgggtgcacacagcaaagcctctttggaggctgaatggggtcccccgactctggctttcccccaggtctacatgttcttggt

SEQ ID NO: 21156 - RNA, 82 nt, synthetic construct
  source 1..82: mol_type = other RNA
tgggtgcacacagcaaagcctctttggaggctgaatggggtcccccgactctggctttcccccaggtatacatgttcttagt

SEQ ID NO: 21157 - RNA, 82 nt, synthetic construct
  source 1..82: mol_type = other RNA
tgggtgcacacagcaaagcctctttggaggctgaatggggtcccccgactctggctttcccccaggtctacatgttcttagt

SEQ ID NO: 21158 - RNA, 82 nt, synthetic construct
  source 1..82: mol_type = other RNA
tgggtgcacacagcaaagcctctttggaggctgaatggggtcccccgactctggctttcccccaggtctacatgtttctggt

SEQ ID NO: 21159 - RNA, 82 nt, synthetic construct
  source 1..82: mol_type = other RNA
tgggtgcacacagcaaagcctctttggaggctgaatggggtcccccgactctggctttcccccaggtctacatgtttttagt

SEQ ID NO: 21160 - RNA, 82 nt, synthetic construct
  source 1..82: mol_type = other RNA
tgggtgcacacagcaaagcctctttggaggctgaatggggtcccccgactctggctttcccccaggtatacatgttcctggt

SEQ ID NO: 21161 - RNA, 82 nt, synthetic construct
  source 1..82: mol_type = other RNA
tgggtgcacacagcaaagcctctttggaggctgaatggggtcccccgactctggctttcccccaggtttacatgtttctggt

SEQ ID NO: 21162 - RNA, 82 nt, synthetic construct
  source 1..82: mol_type = other RNA
tgggtgcacacagcaaagcctctttggaggctgaatggggtcccccgactctggctttcccccaggtatacatgttcttggt

SEQ ID NO: 21163 - RNA, 82 nt, synthetic construct
  source 1..82: mol_type = other RNA
tgggtgcacacagcaaagcctctttggaggctgaatggggtcccccgactctggctttcccccaggtatacatgtttctggt

SEQ ID NO: 21164 - RNA, 82 nt, synthetic construct
  source 1..82: mol_type = other RNA
tgggtgcacacagcaaagcctctttggaggctgaatggggtcccccgactctggctttcccccaggtttacatgttcttggt

SEQ ID NO: 21165 - RNA, 82 nt, synthetic construct
  source 1..82: mol_type = other RNA
tgggtgcacacagcaaagcctctttggaggctgaatggggtcccccgactctggctttcccccaggtatacatgtttttagt

SEQ ID NO: 21166 - RNA, 82 nt, synthetic construct
  source 1..82: mol_type = other RNA
tgggtgcacacagcaaagcctctttggaggctgaatggggtcccccgactctggctttcccccaggtctacatgttcctggt

SEQ ID NO: 21167 - RNA, 82 nt, synthetic construct
  source 1..82: mol_type = other RNA
tgggtgcacacagcaaagcctctttggaggctgaatggggtcccccgactctggctttcccccaggtttacatgttcttagt

SEQ ID NO: 21168 - RNA, 82 nt, synthetic construct
  source 1..82: mol_type = other RNA
tgggtgcacacagcaaagcctctttggaggctgaatggggtcccccgactctggctttcccccaggtgtacatgtttttggt

SEQ ID NO: 21169 - RNA, 82 nt, synthetic construct
  source 1..82: mol_type = other RNA
tgggtgcacacagcaaagcctctttggaggctgaatggggtcccccgactctggctttcccccaggtctacatgtttttggt

SEQ ID NO: 21170 - RNA, 82 nt, synthetic construct
  source 1..82: mol_type = other RNA
tgggtgcacacagcaaagcctctttggaggctgaatggggtcccccgactctggctttcccccaggtgtacatgttcttggt

SEQ ID NO: 21171 - RNA, 82 nt, synthetic construct
  source 1..82: mol_type = other RNA
tgggtgcacacagcaaagcctctttggaggctgaatggggtcccccgactctggctttcccccaggtttacatgttcctggt

SEQ ID NO: 21172 - RNA, 82 nt, synthetic construct
  source 1..82: mol_type = other RNA
tgggtgcacacagcaaagcctctttggaggctgaatggggtcccccgactctggctttcccccaggtgtacatgtttctggt

SEQ ID NO: 21173 - RNA, 82 nt, synthetic construct
  source 1..82: mol_type = other RNA
tgggtgcacacagcaaagcctctttggaggctgaatggggtcccccgactctggctttcccccaggtgtacatgtttttagt

SEQ ID NO: 21174 - RNA, 83 nt, synthetic construct
  source 1..83: mol_type = other RNA
ctgggtgcacacagcaaagcctctttggaggctgaatggggtcccccgactctggctttcccccaggtatacatgttcttagt

SEQ ID NO: 21175 - RNA, 83 nt, synthetic construct
  source 1..83: mol_type = other RNA
ctgggtgcacacagcaaagcctctttggaggctgaatggggtcccccgactctggctttcccccaggtttacatgtttttggt

SEQ ID NO: 21176 - RNA, 83 nt, synthetic construct
  source 1..83: mol_type = other RNA
ctgggtgcacacagcaaagcctctttggaggctgaatggggtcccccgactctggctttcccccaggtttacatgtttttagt

SEQ ID NO: 21177 - RNA, 83 nt, synthetic construct
  source 1..83: mol_type = other RNA
ctgggtgcacacagcaaagcctctttggaggctgaatggggtcccccgactctggctttcccccaggtctacatgtttttagt

SEQ ID NO: 21178 - RNA, 83 nt, synthetic construct
  source 1..83: mol_type = other RNA
ctgggtgcacacagcaaagcctctttggaggctgaatggggtcccccgactctggctttcccccaggtttacatgtttctggt

SEQ ID NO: 21179 - RNA, 83 nt, synthetic construct
  source 1..83: mol_type = other RNA
ctgggtgcacacagcaaagcctctttggaggctgaatggggtcccccgactctggctttcccccaggtatacatgttcctggt

SEQ ID NO: 21180 - RNA, 83 nt, synthetic construct
  source 1..83: mol_type = other RNA
ctgggtgcacacagcaaagcctctttggaggctgaatggggtcccccgactctggctttcccccaggtatacatgttcttggt

SEQ ID NO: 21181 - RNA, 83 nt, synthetic construct
  source 1..83: mol_type = other RNA
ctgggtgcacacagcaaagcctctttggaggctgaatggggtcccccgactctggctttcccccaggtgtacatgtttttggt

SEQ ID NO: 21182 - RNA, 83 nt, synthetic construct
  source 1..83: mol_type = other RNA
ctgggtgcacacagcaaagcctctttggaggctgaatggggtcccccgactctggctttcccccaggtgtacatgtttttagt

SEQ ID NO: 21183 - RNA, 83 nt, synthetic construct
  source 1..83: mol_type = other RNA
ctgggtgcacacagcaaagcctctttggaggctgaatggggtcccccgactctggctttcccccaggtatacatgtttctggt

SEQ ID NO: 21184 - RNA, 83 nt, synthetic construct
  source 1..83: mol_type = other RNA
ctgggtgcacacagcaaagcctctttggaggctgaatggggtcccccgactctggctttcccccaggtgtacatgttcttagt

SEQ ID NO: 21185 - RNA, 83 nt, synthetic construct
  source 1..83: mol_type = other RNA
ctgggtgcacacagcaaagcctctttggaggctgaatggggtcccccgactctggctttcccccaggtgtacatgttcttggt

SEQ ID NO: 21186 - RNA, 83 nt, synthetic construct
  source 1..83: mol_type = other RNA
ctgggtgcacacagcaaagcctctttggaggctgaatggggtcccccgactctggctttcccccaggtgtacatgtttctggt

SEQ ID NO: 21187 - RNA, 83 nt, synthetic construct
  source 1..83: mol_type = other RNA
ctgggtgcacacagcaaagcctctttggaggctgaatggggtcccccgactctggctttcccccaggtttacatgttcctggt

SEQ ID NO: 21188 - RNA, 83 nt, synthetic construct
  source 1..83: mol_type = other RNA
ctgggtgcacacagcaaagcctctttggaggctgaatggggtcccccgactctggctttcccccaggtttacatgttcttagt

SEQ ID NO: 21189 - RNA, 83 nt, synthetic construct
  source 1..83: mol_type = other RNA
ctgggtgcacacagcaaagcctctttggaggctgaatggggtcccccgactctggctttcccccaggtgtacatgttcctggt

SEQ ID NO: 21190 - RNA, 83 nt, synthetic construct
  source 1..83: mol_type = other RNA
ctgggtgcacacagcaaagcctctttggaggctgaatggggtcccccgactctggctttcccccaggtctacatgtttttggt

SEQ ID NO: 21191 - RNA, 83 nt, synthetic construct
  source 1..83: mol_type = other RNA
ctgggtgcacacagcaaagcctctttggaggctgaatggggtcccccgactctggctttcccccaggtatacatgtttttggt

SEQ ID NO: 21192 - RNA, 83 nt, synthetic construct
  source 1..83: mol_type = other RNA
ctgggtgcacacagcaaagcctctttggaggctgaatggggtcccccgactctggctttcccccaggtctacatgtttctggt

SEQ ID NO: 21193 - RNA, 83 nt, synthetic construct
  source 1..83: mol_type = other RNA
ctgggtgcacacagcaaagcctctttggaggctgaatggggtcccccgactctggctttcccccaggtctacatgttcttggt

SEQ ID NO: 21194 - RNA, 83 nt, synthetic construct
  source 1..83: mol_type = other RNA
ctgggtgcacacagcaaagcctctttggaggctgaatggggtcccccgactctggctttcccccaggtctacatgttcttagt

SEQ ID NO: 21195 - RNA, 83 nt, synthetic construct
  source 1..83: mol_type = other RNA
ctgggtgcacacagcaaagcctctttggaggctgaatggggtcccccgactctggctttcccccaggtctacatgttcctggt

SEQ ID NO: 21196 - RNA, 83 nt, synthetic construct
  source 1..83: mol_type = other RNA
ctgggtgcacacagcaaagcctctttggaggctgaatggggtcccccgactctggctttcccccaggtatacatgtttttagt

SEQ ID NO: 21197 - RNA, 83 nt, synthetic construct
  source 1..83: mol_type = other RNA
ctgggtgcacacagcaaagcctctttggaggctgaatggggtcccccgactctggctttcccccaggtttacatgttcttggt

SEQ ID NO: 21198 - RNA, 84 nt, synthetic construct
  source 1..84: mol_type = other RNA
cctgggtgcacacagcaaagcctctttggaggctgaatggggtcccccgactctggctttcccccaggtttacatgttcctggt

SEQ ID NO: 21199 - RNA, 84 nt, synthetic construct
  source 1..84: mol_type = other RNA
cctgggtgcacacagcaaagcctctttggaggctgaatggggtcccccgactctggctttcccccaggtttacatgtttttggt

SEQ ID NO: 21200 - RNA, 84 nt, synthetic construct
  source 1..84: mol_type = other RNA
cctgggtgcacacagcaaagcctctttggaggctgaatggggtcccccgactctggctttcccccaggtttacatgtttttagt

SEQ ID NO: 21201 - RNA, 84 nt, synthetic construct
  source 1..84: mol_type = other RNA
cctgggtgcacacagcaaagcctctttggaggctgaatggggtcccccgactctggctttcccccaggtttacatgtttctggt

SEQ ID NO: 21202 - RNA, 84 nt, synthetic construct
  source 1..84: mol_type = other RNA
cctgggtgcacacagcaaagcctctttggaggctgaatggggtcccccgactctggctttcccccaggtttacatgttcttggt

SEQ ID NO: 21203 - RNA, 84 nt, synthetic construct
  source 1..84: mol_type = other RNA
cctgggtgcacacagcaaagcctctttggaggctgaatggggtcccccgactctggctttcccccaggtttacatgttcttagt

SEQ ID NO: 21204 - RNA, 84 nt, synthetic construct
  source 1..84: mol_type = other RNA
cctgggtgcacacagcaaagcctctttggaggctgaatggggtcccccgactctggctttcccccaggtgtacatgtttttggt

SEQ ID NO: 21205 - RNA, 84 nt, synthetic construct
  source 1..84: mol_type = other RNA
cctgggtgcacacagcaaagcctctttggaggctgaatggggtcccccgactctggctttcccccaggtgtacatgtttttagt

SEQ ID NO: 21206 - RNA, 84 nt, synthetic construct
  source 1..84: mol_type = other RNA
cctgggtgcacacagcaaagcctctttggaggctgaatggggtcccccgactctggctttcccccaggtgtacatgtttctggt

SEQ ID NO: 21207 - RNA, 84 nt, synthetic construct
  source 1..84: mol_type = other RNA
cctgggtgcacacagcaaagcctctttggaggctgaatggggtcccccgactctggctttcccccaggtgtacatgttcttggt

SEQ ID NO: 21208 - RNA, 84 nt, synthetic construct
  source 1..84: mol_type = other RNA
cctgggtgcacacagcaaagcctctttggaggctgaatggggtcccccgactctggctttcccccaggtgtacatgttcctggt

SEQ ID NO: 21209 - RNA, 84 nt, synthetic construct
  source 1..84: mol_type = other RNA
cctgggtgcacacagcaaagcctctttggaggctgaatggggtcccccgactctggctttcccccaggtgtacatgttcttagt

SEQ ID NO: 21210 - RNA, 84 nt, synthetic construct
  source 1..84: mol_type = other RNA
cctgggtgcacacagcaaagcctctttggaggctgaatggggtcccccgactctggctttcccccaggtctacatgtttttagt

SEQ ID NO: 21211 - RNA, 84 nt, synthetic construct
  source 1..84: mol_type = other RNA
cctgggtgcacacagcaaagcctctttggaggctgaatggggtcccccgactctggctttcccccaggtctacatgttcctggt

SEQ ID NO: 21212 - RNA, 84 nt, synthetic construct
  source 1..84: mol_type = other RNA
cctgggtgcacacagcaaagcctctttggaggctgaatggggtcccccgactctggctttcccccaggtatacatgtttttggt

SEQ ID NO: 21213 - RNA, 84 nt, synthetic construct
  source 1..84: mol_type = other RNA
cctgggtgcacacagcaaagcctctttggaggctgaatggggtcccccgactctggctttcccccaggtctacatgtttctggt

SEQ ID NO: 21214 - RNA, 84 nt, synthetic construct
  source 1..84: mol_type = other RNA
cctgggtgcacacagcaaagcctctttggaggctgaatggggtcccccgactctggctttcccccaggtctacatgttcttggt

SEQ ID NO: 21215 - RNA, 84 nt, synthetic construct
  source 1..84: mol_type = other RNA
cctgggtgcacacagcaaagcctctttggaggctgaatggggtcccccgactctggctttcccccaggtatacatgttcctggt

SEQ ID NO: 21216 - RNA, 84 nt, synthetic construct
  source 1..84: mol_type = other RNA
cctgggtgcacacagcaaagcctctttggaggctgaatggggtcccccgactctggctttcccccaggtctacatgtttttggt

SEQ ID NO: 21217 - RNA, 84 nt, synthetic construct
  source 1..84: mol_type = other RNA
cctgggtgcacacagcaaagcctctttggaggctgaatggggtcccccgactctggctttcccccaggtctacatgttcttagt

SEQ ID NO: 21218 - RNA, 84 nt, synthetic construct
  source 1..84: mol_type = other RNA
cctgggtgcacacagcaaagcctctttggaggctgaatggggtcccccgactctggctttcccccaggtatacatgtttttagt

SEQ ID NO: 21219 - RNA, 84 nt, synthetic construct
  source 1..84: mol_type = other RNA
cctgggtgcacacagcaaagcctctttggaggctgaatggggtcccccgactctggctttcccccaggtatacatgttcttagt

SEQ ID NO: 21220 - RNA, 84 nt, synthetic construct
  source 1..84: mol_type = other RNA
cctgggtgcacacagcaaagcctctttggaggctgaatggggtcccccgactctggctttcccccaggtatacatgtttctggt

SEQ ID NO: 21221 - RNA, 84 nt, synthetic construct
  source 1..84: mol_type = other RNA
cctgggtgcacacagcaaagcctctttggaggctgaatggggtcccccgactctggctttcccccaggtatacatgttcttggt

SEQ ID NO: 21222 - RNA, 85 nt, synthetic construct
  source 1..85: mol_type = other RNA
tcctgggtgcacacagcaaagcctctttggaggctgaatggggtcccccgactctggctttcccccaggtttacatgtttttggt

SEQ ID NO: 21223 - RNA, 85 nt, synthetic construct
  source 1..85: mol_type = other RNA
tcctgggtgcacacagcaaagcctctttggaggctgaatggggtcccccgactctggctttcccccaggtatacatgtttttagt

SEQ ID NO: 21224 - RNA, 85 nt, synthetic construct
  source 1..85: mol_type = other RNA
tcctgggtgcacacagcaaagcctctttggaggctgaatggggtcccccgactctggctttcccccaggtgtacatgttcttagt

SEQ ID NO: 21225 - RNA, 85 nt, synthetic construct
  source 1..85: mol_type = other RNA
tcctgggtgcacacagcaaagcctctttggaggctgaatggggtcccccgactctggctttcccccaggtgtacatgttcttggt

SEQ ID NO: 21226 - RNA, 85 nt, synthetic construct
  source 1..85: mol_type = other RNA
tcctgggtgcacacagcaaagcctctttggaggctgaatggggtcccccgactctggctttcccccaggtgtacatgtttttagt

SEQ ID NO: 21227 - RNA, 85 nt, synthetic construct
  source 1..85: mol_type = other RNA
tcctgggtgcacacagcaaagcctctttggaggctgaatggggtcccccgactctggctttcccccaggtgtacatgtttttggt

SEQ ID NO: 21228 - RNA, 85 nt, synthetic construct
  source 1..85: mol_type = other RNA
tcctgggtgcacacagcaaagcctctttggaggctgaatggggtcccccgactctggctttcccccaggtttacatgttcctggt

SEQ ID NO: 21229 - RNA, 85 nt, synthetic construct
  source 1..85: mol_type = other RNA
tcctgggtgcacacagcaaagcctctttggaggctgaatggggtcccccgactctggctttcccccaggtttacatgttcttagt

SEQ ID NO: 21230 - RNA, 85 nt, synthetic construct
  source 1..85: mol_type = other RNA
tcctgggtgcacacagcaaagcctctttggaggctgaatggggtcccccgactctggctttcccccaggtttacatgttcttggt

SEQ ID NO: 21231 - RNA, 85 nt, synthetic construct
  source 1..85: mol_type = other RNA
tcctgggtgcacacagcaaagcctctttggaggctgaatggggtcccccgactctggctttcccccaggtttacatgtttctggt

SEQ ID NO: 21232 - RNA, 85 nt, synthetic construct
  source 1..85: mol_type = other RNA
tcctgggtgcacacagcaaagcctctttggaggctgaatggggtcccccgactctggctttcccccaggtatacatgttcttagt

SEQ ID NO: 21233 - RNA, 85 nt, synthetic construct
  source 1..85: mol_type = other RNA
tcctgggtgcacacagcaaagcctctttggaggctgaatggggtcccccgactctggctttcccccaggtttacatgtttttagt

SEQ ID NO: 21234 - RNA, 85 nt, synthetic construct
  source 1..85: mol_type = other RNA
tcctgggtgcacacagcaaagcctctttggaggctgaatggggtcccccgactctggctttcccccaggtgtacatgtttctggt

SEQ ID NO: 21235 - RNA, 85 nt, synthetic construct
  source 1..85: mol_type = other RNA
tcctgggtgcacacagcaaagcctctttggaggctgaatggggtcccccgactctggctttcccccaggtctacatgtttctggt

SEQ ID NO: 21236 - RNA, 85 nt, synthetic construct
  source 1..85: mol_type = other RNA
tcctgggtgcacacagcaaagcctctttggaggctgaatggggtcccccgactctggctttcccccaggtctacatgttcttagt

SEQ ID NO: 21237 - RNA, 85 nt, synthetic construct
  source 1..85: mol_type = other RNA
tcctgggtgcacacagcaaagcctctttggaggctgaatggggtcccccgactctggctttcccccaggtctacatgttcttggt

SEQ ID NO: 21238 - RNA, 85 nt, synthetic construct
  source 1..85: mol_type = other RNA
tcctgggtgcacacagcaaagcctctttggaggctgaatggggtcccccgactctggctttcccccaggtctacatgtttttggt

SEQ ID NO: 21239 - RNA, 85 nt, synthetic construct
  source 1..85: mol_type = other RNA
tcctgggtgcacacagcaaagcctctttggaggctgaatggggtcccccgactctggctttcccccaggtctacatgtttttagt

SEQ ID NO: 21240 - RNA, 85 nt, synthetic construct
  source 1..85: mol_type = other RNA
tcctgggtgcacacagcaaagcctctttggaggctgaatggggtcccccgactctggctttcccccaggtgtacatgttcctggt

SEQ ID NO: 21241 - RNA, 85 nt, synthetic construct
  source 1..85: mol_type = other RNA
tcctgggtgcacacagcaaagcctctttggaggctgaatggggtcccccgactctggctttcccccaggtatacatgttcttggt

SEQ ID NO: 21242 - RNA, 85 nt, synthetic construct
  source 1..85: mol_type = other RNA
tcctgggtgcacacagcaaagcctctttggaggctgaatggggtcccccgactctggctttcccccaggtatacatgtttctggt

SEQ ID NO: 21243 - RNA, 85 nt, synthetic construct
  source 1..85: mol_type = other RNA
tcctgggtgcacacagcaaagcctctttggaggctgaatggggtcccccgactctggctttcccccaggtatacatgttcctggt

SEQ ID NO: 21244 - RNA, 85 nt, synthetic construct
  source 1..85: mol_type = other RNA
tcctgggtgcacacagcaaagcctctttggaggctgaatggggtcccccgactctggctttcccccaggtatacatgtttttggt

SEQ ID NO: 21245 - RNA, 85 nt, synthetic construct
  source 1..85: mol_type = other RNA
tcctgggtgcacacagcaaagcctctttggaggctgaatggggtcccccgactctggctttcccccaggtctacatgttcctggt

SEQ ID NO: 21246 - RNA, 86 nt, synthetic construct
  source 1..86: mol_type = other RNA
atcctgggtgcacacagcaaagcctctttggaggctgaatggggtcccccgactctggctttcccccaggtctacatgttcttggt

SEQ ID NO: 21247 - RNA, 86 nt, synthetic construct
  source 1..86: mol_type = other RNA
atcctgggtgcacacagcaaagcctctttggaggctgaatggggtcccccgactctggctttcccccaggtctacatgttcctggt

SEQ ID NO: 21248 - RNA, 86 nt, synthetic construct
  source 1..86: mol_type = other RNA
atcctgggtgcacacagcaaagcctctttggaggctgaatggggtcccccgactctggctttcccccaggtatacatgttcctggt

SEQ ID NO: 21249 - RNA, 86 nt, synthetic construct
  source 1..86: mol_type = other RNA
atcctgggtgcacacagcaaagcctctttggaggctgaatggggtcccccgactctggctttcccccaggtatacatgtttttagt

SEQ ID NO: 21250 - RNA, 86 nt, synthetic construct
  source 1..86: mol_type = other RNA
atcctgggtgcacacagcaaagcctctttggaggctgaatggggtcccccgactctggctttcccccaggtatacatgtttctggt

SEQ ID NO: 21251 - RNA, 86 nt, synthetic construct
  source 1..86: mol_type = other RNA
atcctgggtgcacacagcaaagcctctttggaggctgaatggggtcccccgactctggctttcccccaggtatacatgttcttggt

SEQ ID NO: 21252 - RNA, 86 nt, synthetic construct
  source 1..86: mol_type = other RNA
atcctgggtgcacacagcaaagcctctttggaggctgaatggggtcccccgactctggctttcccccaggtatacatgttcttagt

SEQ ID NO: 21253 - RNA, 86 nt, synthetic construct
  source 1..86: mol_type = other RNA
atcctgggtgcacacagcaaagcctctttggaggctgaatggggtcccccgactctggctttcccccaggtatacatgtttttggt

SEQ ID NO: 21254 - RNA, 86 nt, synthetic construct
  source 1..86: mol_type = other RNA
atcctgggtgcacacagcaaagcctctttggaggctgaatggggtcccccgactctggctttcccccaggtctacatgtttttagt

SEQ ID NO: 21255 - RNA, 86 nt, synthetic construct
  source 1..86: mol_type = other RNA
atcctgggtgcacacagcaaagcctctttggaggctgaatggggtcccccgactctggctttcccccaggtctacatgtttttggt

SEQ ID NO: 21256 - RNA, 86 nt, synthetic construct
  source 1..86: mol_type = other RNA
atcctgggtgcacacagcaaagcctctttggaggctgaatggggtcccccgactctggctttcccccaggtgtacatgttcctggt

SEQ ID NO: 21257 - RNA, 86 nt, synthetic construct
  source 1..86: mol_type = other RNA
atcctgggtgcacacagcaaagcctctttggaggctgaatggggtcccccgactctggctttcccccaggtttacatgtttttggt

SEQ ID NO: 21258 - RNA, 86 nt, synthetic construct
  source 1..86: mol_type = other RNA
atcctgggtgcacacagcaaagcctctttggaggctgaatggggtcccccgactctggctttcccccaggtttacatgtttctggt

SEQ ID NO: 21259 - RNA, 86 nt, synthetic construct
  source 1..86: mol_type = other RNA
atcctgggtgcacacagcaaagcctctttggaggctgaatggggtcccccgactctggctttcccccaggtttacatgttcttggt

SEQ ID NO: 21260 - RNA, 86 nt, synthetic construct
  source 1..86: mol_type = other RNA
atcctgggtgcacacagcaaagcctctttggaggctgaatggggtcccccgactctggctttcccccaggtttacatgtttttagt

SEQ ID NO: 21261 - RNA, 86 nt, synthetic construct
  source 1..86: mol_type = other RNA
atcctgggtgcacacagcaaagcctctttggaggctgaatggggtcccccgactctggctttcccccaggtgtacatgtttttagt

SEQ ID NO: 21262 - RNA, 86 nt, synthetic construct
  source 1..86: mol_type = other RNA
atcctgggtgcacacagcaaagcctctttggaggctgaatggggtcccccgactctggctttcccccaggtgtacatgttcttggt

SEQ ID NO: 21263 - RNA, 86 nt, synthetic construct
  source 1..86: mol_type = other RNA
atcctgggtgcacacagcaaagcctctttggaggctgaatggggtcccccgactctggctttcccccaggtgtacatgttcttagt

SEQ ID NO: 21264 - RNA, 86 nt, synthetic construct
  source 1..86: mol_type = other RNA
atcctgggtgcacacagcaaagcctctttggaggctgaatggggtcccccgactctggctttcccccaggtttacatgttcctggt

SEQ ID NO: 21265 - RNA, 86 nt, synthetic construct
  source 1..86: mol_type = other RNA
atcctgggtgcacacagcaaagcctctttggaggctgaatggggtcccccgactctggctttcccccaggtttacatgttcttagt

SEQ ID NO: 21266 - RNA, 86 nt, synthetic construct
  source 1..86: mol_type = other RNA
atcctgggtgcacacagcaaagcctctttggaggctgaatggggtcccccgactctggctttcccccaggtctacatgttcttagt

SEQ ID NO: 21267 - RNA, 86 nt, synthetic construct
  source 1..86: mol_type = other RNA
atcctgggtgcacacagcaaagcctctttggaggctgaatggggtcccccgactctggctttcccccaggtgtacatgtttttggt

SEQ ID NO: 21268 - RNA, 86 nt, synthetic construct
  source 1..86: mol_type = other RNA
atcctgggtgcacacagcaaagcctctttggaggctgaatggggtcccccgactctggctttcccccaggtctacatgtttctggt

SEQ ID NO: 21269 - RNA, 86 nt, synthetic construct
  source 1..86: mol_type = other RNA
atcctgggtgcacacagcaaagcctctttggaggctgaatggggtcccccgactctggctttcccccaggtgtacatgtttctggt

SEQ ID NO: 21270 - RNA, 87 nt, synthetic construct
  source 1..87: mol_type = other RNA
gatcctgggtgcacacagcaaagcctctttggaggctgaatggggtcccccgactctggctttcccccaggtctacatgtttctggt

SEQ ID NO: 21271 - RNA, 87 nt, synthetic construct
  source 1..87: mol_type = other RNA
gatcctgggtgcacacagcaaagcctctttggaggctgaatggggtcccccgactctggctttcccccaggtatacatgtttttggt

SEQ ID NO: 21272 - RNA, 87 nt, synthetic construct
  source 1..87: mol_type = other RNA
gatcctgggtgcacacagcaaagcctctttggaggctgaatggggtcccccgactctggctttcccccaggtgtacatgttcttagt

SEQ ID NO: 21273 - RNA, 87 nt, synthetic construct
  source 1..87: mol_type = other RNA
gatcctgggtgcacacagcaaagcctctttggaggctgaatggggtcccccgactctggctttcccccaggtgtacatgtttctggt

SEQ ID NO: 21274 - RNA, 87 nt, synthetic construct
  source 1..87: mol_type = other RNA
gatcctgggtgcacacagcaaagcctctttggaggctgaatggggtcccccgactctggctttcccccaggtgtacatgtttttagt

SEQ ID NO: 21275 - RNA, 87 nt, synthetic construct
  source 1..87: mol_type = other RNA
gatcctgggtgcacacagcaaagcctctttggaggctgaatggggtcccccgactctggctttcccccaggtgtacatgtttttggt

SEQ ID NO: 21276 - RNA, 87 nt, synthetic construct
  source 1..87: mol_type = other RNA
gatcctgggtgcacacagcaaagcctctttggaggctgaatggggtcccccgactctggctttcccccaggtttacatgttcctggt

SEQ ID NO: 21277 - RNA, 87 nt, synthetic construct
  source 1..87: mol_type = other RNA
gatcctgggtgcacacagcaaagcctctttggaggctgaatggggtcccccgactctggctttcccccaggtttacatgtttttggt

SEQ ID NO: 21278 - RNA, 87 nt, synthetic construct
  source 1..87: mol_type = other RNA
gatcctgggtgcacacagcaaagcctctttggaggctgaatggggtcccccgactctggctttcccccaggtttacatgttcttagt

SEQ ID NO: 21279 - RNA, 87 nt, synthetic construct
  source 1..87: mol_type = other RNA
gatcctgggtgcacacagcaaagcctctttggaggctgaatggggtcccccgactctggctttcccccaggtttacatgtttctggt

SEQ ID NO: 21280 - RNA, 87 nt, synthetic construct
  source 1..87: mol_type = other RNA
gatcctgggtgcacacagcaaagcctctttggaggctgaatggggtcccccgactctggctttcccccaggtttacatgtttttagt

SEQ ID NO: 21281 - RNA, 87 nt, synthetic construct
  source 1..87: mol_type = other RNA
gatcctgggtgcacacagcaaagcctctttggaggctgaatggggtcccccgactctggctttcccccaggtgtacatgttcttggt

SEQ ID NO: 21282 - RNA, 87 nt, synthetic construct
  source 1..87: mol_type = other RNA
gatcctgggtgcacacagcaaagcctctttggaggctgaatggggtcccccgactctggctttcccccaggtatacatgtttttagt

SEQ ID NO: 21283 - RNA, 87 nt, synthetic construct
  source 1..87: mol_type = other RNA
gatcctgggtgcacacagcaaagcctctttggaggctgaatggggtcccccgactctggctttcccccaggtctacatgtttttggt

SEQ ID NO: 21284 - RNA, 87 nt, synthetic construct
  source 1..87: mol_type = other RNA
gatcctgggtgcacacagcaaagcctctttggaggctgaatggggtcccccgactctggctttcccccaggtatacatgttcttagt

SEQ ID NO: 21285 - RNA, 87 nt, synthetic construct
  source 1..87: mol_type = other RNA
gatcctgggtgcacacagcaaagcctctttggaggctgaatggggtcccccgactctggctttcccccaggtctacatgtttttagt

SEQ ID NO: 21286 - RNA, 87 nt, synthetic construct
  source 1..87: mol_type = other RNA
gatcctgggtgcacacagcaaagcctctttggaggctgaatggggtcccccgactctggctttcccccaggtctacatgttcttagt

SEQ ID NO: 21287 - RNA, 87 nt, synthetic construct
  source 1..87: mol_type = other RNA
gatcctgggtgcacacagcaaagcctctttggaggctgaatggggtcccccgactctggctttcccccaggtgtacatgttcctggt

SEQ ID NO: 21288 - RNA, 87 nt, synthetic construct
  source 1..87: mol_type = other RNA
gatcctgggtgcacacagcaaagcctctttggaggctgaatggggtcccccgactctggctttcccccaggtatacatgttcctggt

SEQ ID NO: 21289 - RNA, 87 nt, synthetic construct
  source 1..87: mol_type = other RNA
gatcctgggtgcacacagcaaagcctctttggaggctgaatggggtcccccgactctggctttcccccaggtatacatgtttctggt

SEQ ID NO: 21290 - RNA, 87 nt, synthetic construct
  source 1..87: mol_type = other RNA
gatcctgggtgcacacagcaaagcctctttggaggctgaatggggtcccccgactctggctttcccccaggtatacatgttcttggt

SEQ ID NO: 21291 - RNA, 87 nt, synthetic construct
  source 1..87: mol_type = other RNA
gatcctgggtgcacacagcaaagcctctttggaggctgaatggggtcccccgactctggctttcccccaggtctacatgttcctggt

SEQ ID NO: 21292 - RNA, 87 nt, synthetic construct
  source 1..87: mol_type = other RNA
gatcctgggtgcacacagcaaagcctctttggaggctgaatggggtcccccgactctggctttcccccaggtctacatgttcttggt

SEQ ID NO: 21293 - RNA, 87 nt, synthetic construct
  source 1..87: mol_type = other RNA
gatcctgggtgcacacagcaaagcctctttggaggctgaatggggtcccccgactctggctttcccccaggtttacatgttcttggt

SEQ ID NO: 21294 - RNA, 88 nt, synthetic construct
  source 1..88: mol_type = other RNA
ggatcctgggtgcacacagcaaagcctctttggaggctgaatggggtcccccgactctggctttcccccaggtctacatgttcctggt

SEQ ID NO: 21295 - RNA, 88 nt, synthetic construct
  source 1..88: mol_type = other RNA
ggatcctgggtgcacacagcaaagcctctttggaggctgaatggggtcccccgactctggctttcccccaggtatacatgtttttggt

SEQ ID NO: 21296 - RNA, 88 nt, synthetic construct
  source 1..88: mol_type = other RNA
ggatcctgggtgcacacagcaaagcctctttggaggctgaatggggtcccccgactctggctttcccccaggtatacatgtttttagt

SEQ ID NO: 21297 - RNA, 88 nt, synthetic construct
  source 1..88: mol_type = other RNA
ggatcctgggtgcacacagcaaagcctctttggaggctgaatggggtcccccgactctggctttcccccaggtatacatgtttctggt

SEQ ID NO: 21298 - RNA, 88 nt, synthetic construct
  source 1..88: mol_type = other RNA
ggatcctgggtgcacacagcaaagcctctttggaggctgaatggggtcccccgactctggctttcccccaggtatacatgttcttggt

SEQ ID NO: 21299 - RNA, 88 nt, synthetic construct
  source 1..88: mol_type = other RNA
ggatcctgggtgcacacagcaaagcctctttggaggctgaatggggtcccccgactctggctttcccccaggtttacatgtttttggt

SEQ ID NO: 21300 - RNA, 88 nt, synthetic construct
  source 1..88: mol_type = other RNA
ggatcctgggtgcacacagcaaagcctctttggaggctgaatggggtcccccgactctggctttcccccaggtatacatgttcttagt

SEQ ID NO: 21301 - RNA, 88 nt, synthetic construct
  source 1..88: mol_type = other RNA
ggatcctgggtgcacacagcaaagcctctttggaggctgaatggggtcccccgactctggctttcccccaggtctacatgtttttagt

SEQ ID NO: 21302 - RNA, 88 nt, synthetic construct
  source 1..88: mol_type = other RNA
ggatcctgggtgcacacagcaaagcctctttggaggctgaatggggtcccccgactctggctttcccccaggtctacatgttcttggt

SEQ ID NO: 21303 - RNA, 88 nt, synthetic construct
  source 1..88: mol_type = other RNA
ggatcctgggtgcacacagcaaagcctctttggaggctgaatggggtcccccgactctggctttcccccaggtctacatgtttctggt

SEQ ID NO: 21304 - RNA, 88 nt, synthetic construct
  source 1..88: mol_type = other RNA
ggatcctgggtgcacacagcaaagcctctttggaggctgaatggggtcccccgactctggctttcccccaggtctacatgtttttggt

SEQ ID NO: 21305 - RNA, 88 nt, synthetic construct
  source 1..88: mol_type = other RNA
ggatcctgggtgcacacagcaaagcctctttggaggctgaatggggtcccccgactctggctttcccccaggtatacatgttcctggt

SEQ ID NO: 21306 - RNA, 88 nt, synthetic construct
  source 1..88: mol_type = other RNA
ggatcctgggtgcacacagcaaagcctctttggaggctgaatggggtcccccgactctggctttcccccaggtttacatgttcctggt

SEQ ID NO: 21307 - RNA, 88 nt, synthetic construct
  source 1..88: mol_type = other RNA
ggatcctgggtgcacacagcaaagcctctttggaggctgaatggggtcccccgactctggctttcccccaggtgtacatgttcttggt

SEQ ID NO: 21308 - RNA, 88 nt, synthetic construct
  source 1..88: mol_type = other RNA
ggatcctgggtgcacacagcaaagcctctttggaggctgaatggggtcccccgactctggctttcccccaggtgtacatgtttctggt

SEQ ID NO: 21309 - RNA, 88 nt, synthetic construct
  source 1..88: mol_type = other RNA
ggatcctgggtgcacacagcaaagcctctttggaggctgaatggggtcccccgactctggctttcccccaggtgtacatgtttttagt

SEQ ID NO: 21310 - RNA, 88 nt, synthetic construct
  source 1..88: mol_type = other RNA
ggatcctgggtgcacacagcaaagcctctttggaggctgaatggggtcccccgactctggctttcccccaggtgtacatgtttttggt

SEQ ID NO: 21311 - RNA, 88 nt, synthetic construct
  source 1..88: mol_type = other RNA
ggatcctgggtgcacacagcaaagcctctttggaggctgaatggggtcccccgactctggctttcccccaggtttacatgtttctggt

SEQ ID NO: 21312 - RNA, 88 nt, synthetic construct
  source 1..88: mol_type = other RNA
ggatcctgggtgcacacagcaaagcctctttggaggctgaatggggtcccccgactctggctttcccccaggtttacatgttcttagt

SEQ ID NO: 21313 - RNA, 88 nt, synthetic construct
  source 1..88: mol_type = other RNA
ggatcctgggtgcacacagcaaagcctctttggaggctgaatggggtcccccgactctggctttcccccaggtttacatgttcttggt

SEQ ID NO: 21314 - RNA, 88 nt, synthetic construct
  source 1..88: mol_type = other RNA
ggatcctgggtgcacacagcaaagcctctttggaggctgaatggggtcccccgactctggctttcccccaggtctacatgttcttagt

SEQ ID NO: 21315 - RNA, 88 nt, synthetic construct
  source 1..88: mol_type = other RNA
ggatcctgggtgcacacagcaaagcctctttggaggctgaatggggtcccccgactctggctttcccccaggtttacatgtttttagt

SEQ ID NO: 21316 - RNA, 88 nt, synthetic construct
  source 1..88: mol_type = other RNA
ggatcctgggtgcacacagcaaagcctctttggaggctgaatggggtcccccgactctggctttcccccaggtgtacatgttcctggt

SEQ ID NO: 21317 - RNA, 88 nt, synthetic construct
  source 1..88: mol_type = other RNA
ggatcctgggtgcacacagcaaagcctctttggaggctgaatggggtcccccgactctggctttcccccaggtgtacatgttcttagt

SEQ ID NO: 21318 - RNA, 89 nt, synthetic construct
  source 1..89: mol_type = other RNA
gggatcctgggtgcacacagcaaagcctctttggaggctgaatggggtcccccgactctggctttcccccaggtctacatgtttctggt

SEQ ID NO: 21319 - RNA, 89 nt, synthetic construct
  source 1..89: mol_type = other RNA
gggatcctgggtgcacacagcaaagcctctttggaggctgaatggggtcccccgactctggctttcccccaggtctacatgtttttagt

SEQ ID NO: 21320 - RNA, 89 nt, synthetic construct
  source 1..89: mol_type = other RNA
gggatcctgggtgcacacagcaaagcctctttggaggctgaatggggtcccccgactctggctttcccccaggtatacatgttcttagt

SEQ ID NO: 21321 - RNA, 89 nt, synthetic construct
  source 1..89: mol_type = other RNA
gggatcctgggtgcacacagcaaagcctctttggaggctgaatggggtcccccgactctggctttcccccaggtgtacatgttcttagt

SEQ ID NO: 21322 - RNA, 89 nt, synthetic construct
  source 1..89: mol_type = other RNA
gggatcctgggtgcacacagcaaagcctctttggaggctgaatggggtcccccgactctggctttcccccaggtatacatgtttttagt

SEQ ID NO: 21323 - RNA, 89 nt, synthetic construct
  source 1..89: mol_type = other RNA
gggatcctgggtgcacacagcaaagcctctttggaggctgaatggggtcccccgactctggctttcccccaggtatacatgtttctggt

SEQ ID NO: 21324 - RNA, 89 nt, synthetic construct
  source 1..89: mol_type = other RNA
gggatcctgggtgcacacagcaaagcctctttggaggctgaatggggtcccccgactctggctttcccccaggtatacatgtttttggt

SEQ ID NO: 21325 - RNA, 89 nt, synthetic construct
  source 1..89: mol_type = other RNA
gggatcctgggtgcacacagcaaagcctctttggaggctgaatggggtcccccgactctggctttcccccaggtctacatgttcctggt

SEQ ID NO: 21326 - RNA, 89 nt, synthetic construct
  source 1..89: mol_type = other RNA
gggatcctgggtgcacacagcaaagcctctttggaggctgaatggggtcccccgactctggctttcccccaggtctacatgttcttagt

SEQ ID NO: 21327 - RNA, 89 nt, synthetic construct
  source 1..89: mol_type = other RNA
gggatcctgggtgcacacagcaaagcctctttggaggctgaatggggtcccccgactctggctttcccccaggtctacatgttcttggt

SEQ ID NO: 21328 - RNA, 89 nt, synthetic construct
  source 1..89: mol_type = other RNA
gggatcctgggtgcacacagcaaagcctctttggaggctgaatggggtcccccgactctggctttcccccaggtctacatgtttttggt

SEQ ID NO: 21329 - RNA, 89 nt, synthetic construct
  source 1..89: mol_type = other RNA
gggatcctgggtgcacacagcaaagcctctttggaggctgaatggggtcccccgactctggctttcccccaggtgtacatgttcctggt

SEQ ID NO: 21330 - RNA, 89 nt, synthetic construct
  source 1..89: mol_type = other RNA
gggatcctgggtgcacacagcaaagcctctttggaggctgaatggggtcccccgactctggctttcccccaggtttacatgttcttagt

SEQ ID NO: 21331 - RNA, 89 nt, synthetic construct
  source 1..89: mol_type = other RNA
gggatcctgggtgcacacagcaaagcctctttggaggctgaatggggtcccccgactctggctttcccccaggtgtacatgttcttggt

SEQ ID NO: 21332 - RNA, 89 nt, synthetic construct
  source 1..89: mol_type = other RNA
gggatcctgggtgcacacagcaaagcctctttggaggctgaatggggtcccccgactctggctttcccccaggtttacatgtttttggt

SEQ ID NO: 21333 - RNA, 89 nt, synthetic construct
  source 1..89: mol_type = other RNA
gggatcctgggtgcacacagcaaagcctctttggaggctgaatggggtcccccgactctggctttcccccaggtttacatgtttttagt

SEQ ID NO: 21334 - RNA, 89 nt, synthetic construct
  source 1..89: mol_type = other RNA
gggatcctgggtgcacacagcaaagcctctttggaggctgaatggggtcccccgactctggctttcccccaggtttacatgtttctggt

SEQ ID NO: 21335 - RNA, 89 nt, synthetic construct
  source 1..89: mol_type = other RNA
gggatcctgggtgcacacagcaaagcctctttggaggctgaatggggtcccccgactctggctttcccccaggtttacatgttcttggt

SEQ ID NO: 21336 - RNA, 89 nt, synthetic construct
  source 1..89: mol_type = other RNA
gggatcctgggtgcacacagcaaagcctctttggaggctgaatggggtcccccgactctggctttcccccaggtatacatgttcctggt

SEQ ID NO: 21337 - RNA, 89 nt, synthetic construct
  source 1..89: mol_type = other RNA
gggatcctgggtgcacacagcaaagcctctttggaggctgaatggggtcccccgactctggctttcccccaggtttacatgttcctggt

SEQ ID NO: 21338 - RNA, 89 nt, synthetic construct
  source 1..89: mol_type = other RNA
gggatcctgggtgcacacagcaaagcctctttggaggctgaatggggtcccccgactctggctttcccccaggtgtacatgtttttagt

SEQ ID NO: 21339 - RNA, 89 nt, synthetic construct
  source 1..89: mol_type = other RNA
gggatcctgggtgcacacagcaaagcctctttggaggctgaatggggtcccccgactctggctttcccccaggtatacatgttcttggt

SEQ ID NO: 21340 - RNA, 89 nt, synthetic construct
  source 1..89: mol_type = other RNA
gggatcctgggtgcacacagcaaagcctctttggaggctgaatggggtcccccgactctggctttcccccaggtgtacatgtttttggt

SEQ ID NO: 21341 - RNA, 89 nt, synthetic construct
  source 1..89: mol_type = other RNA
gggatcctgggtgcacacagcaaagcctctttggaggctgaatggggtcccccgactctggctttcccccaggtgtacatgtttctggt

SEQ ID NO: 21342 - RNA, 90 nt, synthetic construct
  source 1..90: mol_type = other RNA
tgggatcctgggtgcacacagcaaagcctctttggaggctgaatggggtcccccgactctggctttcccccaggtctacatgtttttagt

SEQ ID NO: 21343 - RNA, 90 nt, synthetic construct
  source 1..90: mol_type = other RNA
tgggatcctgggtgcacacagcaaagcctctttggaggctgaatggggtcccccgactctggctttcccccaggtatacatgtttctggt

SEQ ID NO: 21344 - RNA, 90 nt, synthetic construct
  source 1..90: mol_type = other RNA
tgggatcctgggtgcacacagcaaagcctctttggaggctgaatggggtcccccgactctggctttcccccaggtttacatgtttttagt

SEQ ID NO: 21345 - RNA, 90 nt, synthetic construct
  source 1..90: mol_type = other RNA
tgggatcctgggtgcacacagcaaagcctctttggaggctgaatggggtcccccgactctggctttcccccaggtatacatgttcctggt

SEQ ID NO: 21346 - RNA, 90 nt, synthetic construct
  source 1..90: mol_type = other RNA
tgggatcctgggtgcacacagcaaagcctctttggaggctgaatggggtcccccgactctggctttcccccaggtatacatgttcttagt

SEQ ID NO: 21347 - RNA, 90 nt, synthetic construct
  source 1..90: mol_type = other RNA
tgggatcctgggtgcacacagcaaagcctctttggaggctgaatggggtcccccgactctggctttcccccaggtatacatgttcttggt

SEQ ID NO: 21348 - RNA, 90 nt, synthetic construct
  source 1..90: mol_type = other RNA
tgggatcctgggtgcacacagcaaagcctctttggaggctgaatggggtcccccgactctggctttcccccaggtatacatgtttttggt

SEQ ID NO: 21349 - RNA, 90 nt, synthetic construct
  source 1..90: mol_type = other RNA
tgggatcctgggtgcacacagcaaagcctctttggaggctgaatggggtcccccgactctggctttcccccaggtctacatgttcttggt

SEQ ID NO: 21350 - RNA, 90 nt, synthetic construct
  source 1..90: mol_type = other RNA
tgggatcctgggtgcacacagcaaagcctctttggaggctgaatggggtcccccgactctggctttcccccaggtatacatgtttttagt

SEQ ID NO: 21351 - RNA, 90 nt, synthetic construct
  source 1..90: mol_type = other RNA
tgggatcctgggtgcacacagcaaagcctctttggaggctgaatggggtcccccgactctggctttcccccaggtctacatgttcttagt

SEQ ID NO: 21352 - RNA, 90 nt, synthetic construct
  source 1..90: mol_type = other RNA
tgggatcctgggtgcacacagcaaagcctctttggaggctgaatggggtcccccgactctggctttcccccaggtctacatgttcctggt

SEQ ID NO: 21353 - RNA, 90 nt, synthetic construct
  source 1..90: mol_type = other RNA
tgggatcctgggtgcacacagcaaagcctctttggaggctgaatggggtcccccgactctggctttcccccaggtgtacatgttcttagt

SEQ ID NO: 21354 - RNA, 90 nt, synthetic construct
  source 1..90: mol_type = other RNA
tgggatcctgggtgcacacagcaaagcctctttggaggctgaatggggtcccccgactctggctttcccccaggtctacatgtttttggt

SEQ ID NO: 21355 - RNA, 90 nt, synthetic construct
  source 1..90: mol_type = other RNA
tgggatcctgggtgcacacagcaaagcctctttggaggctgaatggggtcccccgactctggctttcccccaggtttacatgttcctggt

SEQ ID NO: 21356 - RNA, 90 nt, synthetic construct
  source 1..90: mol_type = other RNA
tgggatcctgggtgcacacagcaaagcctctttggaggctgaatggggtcccccgactctggctttcccccaggtgtacatgttcttggt

SEQ ID NO: 21357 - RNA, 90 nt, synthetic construct
  source 1..90: mol_type = other RNA
tgggatcctgggtgcacacagcaaagcctctttggaggctgaatggggtcccccgactctggctttcccccaggtgtacatgtttttagt

SEQ ID NO: 21358 - RNA, 90 nt, synthetic construct
  source 1..90: mol_type = other RNA
tgggatcctgggtgcacacagcaaagcctctttggaggctgaatggggtcccccgactctggctttcccccaggtttacatgttcttagt

SEQ ID NO: 21359 - RNA, 90 nt, synthetic construct
  source 1..90: mol_type = other RNA
tgggatcctgggtgcacacagcaaagcctctttggaggctgaatggggtcccccgactctggctttcccccaggtttacatgtttttggt

SEQ ID NO: 21360 - RNA, 90 nt, synthetic construct
  source 1..90: mol_type = other RNA
tgggatcctgggtgcacacagcaaagcctctttggaggctgaatggggtcccccgactctggctttcccccaggtgtacatgtttctggt

SEQ ID NO: 21361 - RNA, 90 nt, synthetic construct
  source 1..90: mol_type = other RNA
tgggatcctgggtgcacacagcaaagcctctttggaggctgaatggggtcccccgactctggctttcccccaggtttacatgtttctggt

SEQ ID NO: 21362 - RNA, 90 nt, synthetic construct
  source 1..90: mol_type = other RNA
tgggatcctgggtgcacacagcaaagcctctttggaggctgaatggggtcccccgactctggctttcccccaggtttacatgttcttggt

SEQ ID NO: 21363 - RNA, 90 nt, synthetic construct
  source 1..90: mol_type = other RNA
tgggatcctgggtgcacacagcaaagcctctttggaggctgaatggggtcccccgactctggctttcccccaggtgtacatgtttttggt

SEQ ID NO: 21364 - RNA, 90 nt, synthetic construct
  source 1..90: mol_type = other RNA
tgggatcctgggtgcacacagcaaagcctctttggaggctgaatggggtcccccgactctggctttcccccaggtgtacatgttcctggt

SEQ ID NO: 21365 - RNA, 90 nt, synthetic construct
  source 1..90: mol_type = other RNA
tgggatcctgggtgcacacagcaaagcctctttggaggctgaatggggtcccccgactctggctttcccccaggtctacatgtttctggt

SEQ ID NO: 21366 - RNA, 91 nt, synthetic construct
  source 1..91: mol_type = other RNA
gtgggatcctgggtgcacacagcaaagcctctttggaggctgaatggggtcccccgactctggctttcccccaggtgtacatgtttttagt

SEQ ID NO: 21367 - RNA, 91 nt, synthetic construct
  source 1..91: mol_type = other RNA
gtgggatcctgggtgcacacagcaaagcctctttggaggctgaatggggtcccccgactctggctttcccccaggtctacatgtttttggt

SEQ ID NO: 21368 - RNA, 91 nt, synthetic construct
  source 1..91: mol_type = other RNA
gtgggatcctgggtgcacacagcaaagcctctttggaggctgaatggggtcccccgactctggctttcccccaggtgtacatgttcctggt

SEQ ID NO: 21369 - RNA, 91 nt, synthetic construct
  source 1..91: mol_type = other RNA
gtgggatcctgggtgcacacagcaaagcctctttggaggctgaatggggtcccccgactctggctttcccccaggtgtacatgtttttggt

SEQ ID NO: 21370 - RNA, 91 nt, synthetic construct
  source 1..91: mol_type = other RNA
gtgggatcctgggtgcacacagcaaagcctctttggaggctgaatggggtcccccgactctggctttcccccaggtctacatgtttttagt

SEQ ID NO: 21371 - RNA, 91 nt, synthetic construct
  source 1..91: mol_type = other RNA
gtgggatcctgggtgcacacagcaaagcctctttggaggctgaatggggtcccccgactctggctttcccccaggtctacatgtttctggt

SEQ ID NO: 21372 - RNA, 91 nt, synthetic construct
  source 1..91: mol_type = other RNA
gtgggatcctgggtgcacacagcaaagcctctttggaggctgaatggggtcccccgactctggctttcccccaggtatacatgtttttggt

SEQ ID NO: 21373 - RNA, 91 nt, synthetic construct
  source 1..91: mol_type = other RNA
gtgggatcctgggtgcacacagcaaagcctctttggaggctgaatggggtcccccgactctggctttcccccaggtctacatgttcctggt

SEQ ID NO: 21374 - RNA, 91 nt, synthetic construct
  source 1..91: mol_type = other RNA
gtgggatcctgggtgcacacagcaaagcctctttggaggctgaatggggtcccccgactctggctttcccccaggtctacatgttcttggt

SEQ ID NO: 21375 - RNA, 91 nt, synthetic construct
  source 1..91: mol_type = other RNA
gtgggatcctgggtgcacacagcaaagcctctttggaggctgaatggggtcccccgactctggctttcccccaggtgtacatgttcttggt

SEQ ID NO: 21376 - RNA, 91 nt, synthetic construct
  source 1..91: mol_type = other RNA
gtgggatcctgggtgcacacagcaaagcctctttggaggctgaatggggtcccccgactctggctttcccccaggtgtacatgtttctggt

SEQ ID NO: 21377 - RNA, 91 nt, synthetic construct
  source 1..91: mol_type = other RNA
gtgggatcctgggtgcacacagcaaagcctctttggaggctgaatggggtcccccgactctggctttcccccaggtgtacatgttcttagt

SEQ ID NO: 21378 - RNA, 91 nt, synthetic construct
  source 1..91: mol_type = other RNA
gtgggatcctgggtgcacacagcaaagcctctttggaggctgaatggggtcccccgactctggctttcccccaggtatacatgtttctggt

SEQ ID NO: 21379 - RNA, 91 nt, synthetic construct
  source 1..91: mol_type = other RNA
gtgggatcctgggtgcacacagcaaagcctctttggaggctgaatggggtcccccgactctggctttcccccaggtatacatgttcttggt

SEQ ID NO: 21380 - RNA, 91 nt, synthetic construct
  source 1..91: mol_type = other RNA
gtgggatcctgggtgcacacagcaaagcctctttggaggctgaatggggtcccccgactctggctttcccccaggtatacatgttcttagt

SEQ ID NO: 21381 - RNA, 91 nt, synthetic construct
  source 1..91: mol_type = other RNA
gtgggatcctgggtgcacacagcaaagcctctttggaggctgaatggggtcccccgactctggctttcccccaggtttacatgtttttggt

SEQ ID NO: 21382 - RNA, 91 nt, synthetic construct
  source 1..91: mol_type = other RNA
gtgggatcctgggtgcacacagcaaagcctctttggaggctgaatggggtcccccgactctggctttcccccaggtctacatgttcttagt

SEQ ID NO: 21383 - RNA, 91 nt, synthetic construct
  source 1..91: mol_type = other RNA
gtgggatcctgggtgcacacagcaaagcctctttggaggctgaatggggtcccccgactctggctttcccccaggtttacatgtttttagt

SEQ ID NO: 21384 - RNA, 91 nt, synthetic construct
  source 1..91: mol_type = other RNA
gtgggatcctgggtgcacacagcaaagcctctttggaggctgaatggggtcccccgactctggctttcccccaggtttacatgtttctggt

SEQ ID NO: 21385 - RNA, 91 nt, synthetic construct
  source 1..91: mol_type = other RNA
gtgggatcctgggtgcacacagcaaagcctctttggaggctgaatggggtcccccgactctggctttcccccaggtttacatgttcttggt

SEQ ID NO: 21386 - RNA, 91 nt, synthetic construct
  source 1..91: mol_type = other RNA
gtgggatcctgggtgcacacagcaaagcctctttggaggctgaatggggtcccccgactctggctttcccccaggtttacatgttcttagt

SEQ ID NO: 21387 - RNA, 91 nt, synthetic construct
  source 1..91: mol_type = other RNA
gtgggatcctgggtgcacacagcaaagcctctttggaggctgaatggggtcccccgactctggctttcccccaggtttacatgttcctggt

SEQ ID NO: 21388 - RNA, 91 nt, synthetic construct
  source 1..91: mol_type = other RNA
gtgggatcctgggtgcacacagcaaagcctctttggaggctgaatggggtcccccgactctggctttcccccaggtatacatgtttttagt

SEQ ID NO: 21389 - RNA, 91 nt, synthetic construct
  source 1..91: mol_type = other RNA
gtgggatcctgggtgcacacagcaaagcctctttggaggctgaatggggtcccccgactctggctttcccccaggtatacatgttcctggt

SEQ ID NO: 21390 - RNA, 92 nt, synthetic construct
  source 1..92: mol_type = other RNA
agtgggatcctgggtgcacacagcaaagcctctttggaggctgaatggggtcccccgactctggctttcccccaggtttacatgtttttagt

SEQ ID NO: 21391 - RNA, 92 nt, synthetic construct
  source 1..92: mol_type = other RNA
agtgggatcctgggtgcacacagcaaagcctctttggaggctgaatggggtcccccgactctggctttcccccaggtgtacatgtttctggt

SEQ ID NO: 21392 - RNA, 92 nt, synthetic construct
  source 1..92: mol_type = other RNA
agtgggatcctgggtgcacacagcaaagcctctttggaggctgaatggggtcccccgactctggctttcccccaggtttacatgttcctggt

SEQ ID NO: 21393 - RNA, 92 nt, synthetic construct
  source 1..92: mol_type = other RNA
agtgggatcctgggtgcacacagcaaagcctctttggaggctgaatggggtcccccgactctggctttcccccaggtatacatgttcctggt

SEQ ID NO: 21394 - RNA, 92 nt, synthetic construct
  source 1..92: mol_type = other RNA
agtgggatcctgggtgcacacagcaaagcctctttggaggctgaatggggtcccccgactctggctttcccccaggtatacatgttcttagt

SEQ ID NO: 21395 - RNA, 92 nt, synthetic construct
  source 1..92: mol_type = other RNA
agtgggatcctgggtgcacacagcaaagcctctttggaggctgaatggggtcccccgactctggctttcccccaggtatacatgttcttggt

SEQ ID NO: 21396 - RNA, 92 nt, synthetic construct
  source 1..92: mol_type = other RNA
agtgggatcctgggtgcacacagcaaagcctctttggaggctgaatggggtcccccgactctggctttcccccaggtatacatgtttctggt

SEQ ID NO: 21397 - RNA, 92 nt, synthetic construct
  source 1..92: mol_type = other RNA
agtgggatcctgggtgcacacagcaaagcctctttggaggctgaatggggtcccccgactctggctttcccccaggtatacatgtttttagt

SEQ ID NO: 21398 - RNA, 92 nt, synthetic construct
  source 1..92: mol_type = other RNA
agtgggatcctgggtgcacacagcaaagcctctttggaggctgaatggggtcccccgactctggctttcccccaggtctacatgttcttagt

SEQ ID NO: 21399 - RNA, 92 nt, synthetic construct
  source 1..92: mol_type = other RNA
agtgggatcctgggtgcacacagcaaagcctctttggaggctgaatggggtcccccgactctggctttcccccaggtatacatgtttttggt

SEQ ID NO: 21400 - RNA, 92 nt, synthetic construct
  source 1..92: mol_type = other RNA
agtgggatcctgggtgcacacagcaaagcctctttggaggctgaatggggtcccccgactctggctttcccccaggtttacatgttcttagt

SEQ ID NO: 21401 - RNA, 92 nt, synthetic construct
  source 1..92: mol_type = other RNA
agtgggatcctgggtgcacacagcaaagcctctttggaggctgaatggggtcccccgactctggctttcccccaggtctacatgttcttggt

SEQ ID NO: 21402 - RNA, 92 nt, synthetic construct
  source 1..92: mol_type = other RNA
agtgggatcctgggtgcacacagcaaagcctctttggaggctgaatggggtcccccgactctggctttcccccaggtctacatgtttttagt

SEQ ID NO: 21403 - RNA, 92 nt, synthetic construct
  source 1..92: mol_type = other RNA
agtgggatcctgggtgcacacagcaaagcctctttggaggctgaatggggtcccccgactctggctttcccccaggtctacatgtttttggt

SEQ ID NO: 21404 - RNA, 92 nt, synthetic construct
  source 1..92: mol_type = other RNA
agtgggatcctgggtgcacacagcaaagcctctttggaggctgaatggggtcccccgactctggctttcccccaggtgtacatgttcctggt

SEQ ID NO: 21405 - RNA, 92 nt, synthetic construct
  source 1..92: mol_type = other RNA
agtgggatcctgggtgcacacagcaaagcctctttggaggctgaatggggtcccccgactctggctttcccccaggtgtacatgttcttagt

SEQ ID NO: 21406 - RNA, 92 nt, synthetic construct
  source 1..92: mol_type = other RNA
agtgggatcctgggtgcacacagcaaagcctctttggaggctgaatggggtcccccgactctggctttcccccaggtgtacatgttcttggt

SEQ ID NO: 21407 - RNA, 92 nt, synthetic construct
  source 1..92: mol_type = other RNA
agtgggatcctgggtgcacacagcaaagcctctttggaggctgaatggggtcccccgactctggctttcccccaggtgtacatgtttttagt

SEQ ID NO: 21408 - RNA, 92 nt, synthetic construct
  source 1..92: mol_type = other RNA
agtgggatcctgggtgcacacagcaaagcctctttggaggctgaatggggtcccccgactctggctttcccccaggtgtacatgtttttggt

SEQ ID NO: 21409 - RNA, 92 nt, synthetic construct
  source 1..92: mol_type = other RNA
agtgggatcctgggtgcacacagcaaagcctctttggaggctgaatggggtcccccgactctggctttcccccaggtctacatgtttctggt

SEQ ID NO: 21410 - RNA, 92 nt, synthetic construct
  source 1..92: mol_type = other RNA
agtgggatcctgggtgcacacagcaaagcctctttggaggctgaatggggtcccccgactctggctttcccccaggtctacatgttcctggt

SEQ ID NO: 21411 - RNA, 92 nt, synthetic construct
  source 1..92: mol_type = other RNA
agtgggatcctgggtgcacacagcaaagcctctttggaggctgaatggggtcccccgactctggctttcccccaggtttacatgtttttggt

SEQ ID NO: 21412 - RNA, 92 nt, synthetic construct
  source 1..92: mol_type = other RNA
agtgggatcctgggtgcacacagcaaagcctctttggaggctgaatggggtcccccgactctggctttcccccaggtttacatgttcttggt

SEQ ID NO: 21413 - RNA, 92 nt, synthetic construct
  source 1..92: mol_type = other RNA
agtgggatcctgggtgcacacagcaaagcctctttggaggctgaatggggtcccccgactctggctttcccccaggtttacatgtttctggt

SEQ ID NO: 21414 - RNA, 93 nt, synthetic construct
  source 1..93: mol_type = other RNA
tagtgggatcctgggtgcacacagcaaagcctctttggaggctgaatggggtcccccgactctggctttcccccaggtctacatgtttttagt

SEQ ID NO: 21415 - RNA, 93 nt, synthetic construct
  source 1..93: mol_type = other RNA
tagtgggatcctgggtgcacacagcaaagcctctttggaggctgaatggggtcccccgactctggctttcccccaggtttacatgttcttagt

SEQ ID NO: 21416 - RNA, 93 nt, synthetic construct
  source 1..93: mol_type = other RNA
tagtgggatcctgggtgcacacagcaaagcctctttggaggctgaatggggtcccccgactctggctttcccccaggtttacatgttcctggt

SEQ ID NO: 21417 - RNA, 93 nt, synthetic construct
  source 1..93: mol_type = other RNA
tagtgggatcctgggtgcacacagcaaagcctctttggaggctgaatggggtcccccgactctggctttcccccaggtgtacatgtttttggt

SEQ ID NO: 21418 - RNA, 93 nt, synthetic construct
  source 1..93: mol_type = other RNA
tagtgggatcctgggtgcacacagcaaagcctctttggaggctgaatggggtcccccgactctggctttcccccaggtgtacatgtttttagt

SEQ ID NO: 21419 - RNA, 93 nt, synthetic construct
  source 1..93: mol_type = other RNA
tagtgggatcctgggtgcacacagcaaagcctctttggaggctgaatggggtcccccgactctggctttcccccaggtgtacatgtttctggt

SEQ ID NO: 21420 - RNA, 93 nt, synthetic construct
  source 1..93: mol_type = other RNA
tagtgggatcctgggtgcacacagcaaagcctctttggaggctgaatggggtcccccgactctggctttcccccaggtgtacatgttcttggt

SEQ ID NO: 21421 - RNA, 93 nt, synthetic construct
  source 1..93: mol_type = other RNA
tagtgggatcctgggtgcacacagcaaagcctctttggaggctgaatggggtcccccgactctggctttcccccaggtgtacatgttcttagt

SEQ ID NO: 21422 - RNA, 93 nt, synthetic construct
  source 1..93: mol_type = other RNA
tagtgggatcctgggtgcacacagcaaagcctctttggaggctgaatggggtcccccgactctggctttcccccaggtatacatgttcctggt

SEQ ID NO: 21423 - RNA, 93 nt, synthetic construct
  source 1..93: mol_type = other RNA
tagtgggatcctgggtgcacacagcaaagcctctttggaggctgaatggggtcccccgactctggctttcccccaggtgtacatgttcctggt

SEQ ID NO: 21424 - RNA, 93 nt, synthetic construct
  source 1..93: mol_type = other RNA
tagtgggatcctgggtgcacacagcaaagcctctttggaggctgaatggggtcccccgactctggctttcccccaggtctacatgttcttggt

SEQ ID NO: 21425 - RNA, 93 nt, synthetic construct
  source 1..93: mol_type = other RNA
tagtgggatcctgggtgcacacagcaaagcctctttggaggctgaatggggtcccccgactctggctttcccccaggtctacatgtttctggt

SEQ ID NO: 21426 - RNA, 93 nt, synthetic construct
  source 1..93: mol_type = other RNA
tagtgggatcctgggtgcacacagcaaagcctctttggaggctgaatggggtcccccgactctggctttcccccaggtctacatgttcttagt

SEQ ID NO: 21427 - RNA, 93 nt, synthetic construct
  source 1..93: mol_type = other RNA
tagtgggatcctgggtgcacacagcaaagcctctttggaggctgaatggggtcccccgactctggctttcccccaggtctacatgttcctggt

SEQ ID NO: 21428 - RNA, 93 nt, synthetic construct
  source 1..93: mol_type = other RNA
tagtgggatcctgggtgcacacagcaaagcctctttggaggctgaatggggtcccccgactctggctttcccccaggtatacatgtttttggt

SEQ ID NO: 21429 - RNA, 93 nt, synthetic construct
  source 1..93: mol_type = other RNA
tagtgggatcctgggtgcacacagcaaagcctctttggaggctgaatggggtcccccgactctggctttcccccaggtatacatgttcttggt

SEQ ID NO: 21430 - RNA, 93 nt, synthetic construct
  source 1..93: mol_type = other RNA
tagtgggatcctgggtgcacacagcaaagcctctttggaggctgaatggggtcccccgactctggctttcccccaggtttacatgtttttagt

SEQ ID NO: 21431 - RNA, 93 nt, synthetic construct
  source 1..93: mol_type = other RNA
tagtgggatcctgggtgcacacagcaaagcctctttggaggctgaatggggtcccccgactctggctttcccccaggtctacatgtttttggt

SEQ ID NO: 21432 - RNA, 93 nt, synthetic construct
  source 1..93: mol_type = other RNA
tagtgggatcctgggtgcacacagcaaagcctctttggaggctgaatggggtcccccgactctggctttcccccaggtttacatgtttttggt

SEQ ID NO: 21433 - RNA, 93 nt, synthetic construct
  source 1..93: mol_type = other RNA
tagtgggatcctgggtgcacacagcaaagcctctttggaggctgaatggggtcccccgactctggctttcccccaggtatacatgtttttagt

SEQ ID NO: 21434 - RNA, 93 nt, synthetic construct
  source 1..93: mol_type = other RNA
tagtgggatcctgggtgcacacagcaaagcctctttggaggctgaatggggtcccccgactctggctttcccccaggtttacatgttcttggt

SEQ ID NO: 21435 - RNA, 93 nt, synthetic construct
  source 1..93: mol_type = other RNA
tagtgggatcctgggtgcacacagcaaagcctctttggaggctgaatggggtcccccgactctggctttcccccaggtatacatgttcttagt

SEQ ID NO: 21436 - RNA, 93 nt, synthetic construct
  source 1..93: mol_type = other RNA
tagtgggatcctgggtgcacacagcaaagcctctttggaggctgaatggggtcccccgactctggctttcccccaggtttacatgtttctggt

SEQ ID NO: 21437 - RNA, 93 nt, synthetic construct
  source 1..93: mol_type = other RNA
tagtgggatcctgggtgcacacagcaaagcctctttggaggctgaatggggtcccccgactctggctttcccccaggtatacatgtttctggt

SEQ ID NO: 21438 - RNA, 94 nt, synthetic construct
  source 1..94: mol_type = other RNA
gtagtgggatcctgggtgcacacagcaaagcctctttggaggctgaatggggtcccccgactctggctttcccccaggtctacatgttcctggt

SEQ ID NO: 21439 - RNA, 94 nt, synthetic construct
  source 1..94: mol_type = other RNA
gtagtgggatcctgggtgcacacagcaaagcctctttggaggctgaatggggtcccccgactctggctttcccccaggtctacatgtttctggt

SEQ ID NO: 21440 - RNA, 94 nt, synthetic construct
  source 1..94: mol_type = other RNA
gtagtgggatcctgggtgcacacagcaaagcctctttggaggctgaatggggtcccccgactctggctttcccccaggtctacatgttcttagt

SEQ ID NO: 21441 - RNA, 94 nt, synthetic construct
  source 1..94: mol_type = other RNA
gtagtgggatcctgggtgcacacagcaaagcctctttggaggctgaatggggtcccccgactctggctttcccccaggtatacatgttcttagt

SEQ ID NO: 21442 - RNA, 94 nt, synthetic construct
  source 1..94: mol_type = other RNA
gtagtgggatcctgggtgcacacagcaaagcctctttggaggctgaatggggtcccccgactctggctttcccccaggtatacatgttcctggt

SEQ ID NO: 21443 - RNA, 94 nt, synthetic construct
  source 1..94: mol_type = other RNA
gtagtgggatcctgggtgcacacagcaaagcctctttggaggctgaatggggtcccccgactctggctttcccccaggtttacatgtttttagt

SEQ ID NO: 21444 - RNA, 94 nt, synthetic construct
  source 1..94: mol_type = other RNA
gtagtgggatcctgggtgcacacagcaaagcctctttggaggctgaatggggtcccccgactctggctttcccccaggtttacatgtttctggt

SEQ ID NO: 21445 - RNA, 94 nt, synthetic construct
  source 1..94: mol_type = other RNA
gtagtgggatcctgggtgcacacagcaaagcctctttggaggctgaatggggtcccccgactctggctttcccccaggtctacatgttcttggt

SEQ ID NO: 21446 - RNA, 94 nt, synthetic construct
  source 1..94: mol_type = other RNA
gtagtgggatcctgggtgcacacagcaaagcctctttggaggctgaatggggtcccccgactctggctttcccccaggtttacatgttcttggt

SEQ ID NO: 21447 - RNA, 94 nt, synthetic construct
  source 1..94: mol_type = other RNA
gtagtgggatcctgggtgcacacagcaaagcctctttggaggctgaatggggtcccccgactctggctttcccccaggtgtacatgtttttggt

SEQ ID NO: 21448 - RNA, 94 nt, synthetic construct
  source 1..94: mol_type = other RNA
gtagtgggatcctgggtgcacacagcaaagcctctttggaggctgaatggggtcccccgactctggctttcccccaggtgtacatgtttttagt

SEQ ID NO: 21449 - RNA, 94 nt, synthetic construct
  source 1..94: mol_type = other RNA
gtagtgggatcctgggtgcacacagcaaagcctctttggaggctgaatggggtcccccgactctggctttcccccaggtgtacatgtttctggt

SEQ ID NO: 21450 - RNA, 94 nt, synthetic construct
  source 1..94: mol_type = other RNA
gtagtgggatcctgggtgcacacagcaaagcctctttggaggctgaatggggtcccccgactctggctttcccccaggtgtacatgttcttggt

SEQ ID NO: 21451 - RNA, 94 nt, synthetic construct
  source 1..94: mol_type = other RNA
gtagtgggatcctgggtgcacacagcaaagcctctttggaggctgaatggggtcccccgactctggctttcccccaggtttacatgtttttggt

SEQ ID NO: 21452 - RNA, 94 nt, synthetic construct
  source 1..94: mol_type = other RNA
gtagtgggatcctgggtgcacacagcaaagcctctttggaggctgaatggggtcccccgactctggctttcccccaggtttacatgttcttagt

SEQ ID NO: 21453 - RNA, 94 nt, synthetic construct
  source 1..94: mol_type = other RNA
gtagtgggatcctgggtgcacacagcaaagcctctttggaggctgaatggggtcccccgactctggctttcccccaggtctacatgtttttggt

SEQ ID NO: 21454 - RNA, 94 nt, synthetic construct
  source 1..94: mol_type = other RNA
gtagtgggatcctgggtgcacacagcaaagcctctttggaggctgaatggggtcccccgactctggctttcccccaggtatacatgtttttagt

SEQ ID NO: 21455 - RNA, 94 nt, synthetic construct
  source 1..94: mol_type = other RNA
gtagtgggatcctgggtgcacacagcaaagcctctttggaggctgaatggggtcccccgactctggctttcccccaggtctacatgtttttagt

SEQ ID NO: 21456 - RNA, 94 nt, synthetic construct
  source 1..94: mol_type = other RNA
gtagtgggatcctgggtgcacacagcaaagcctctttggaggctgaatggggtcccccgactctggctttcccccaggtgtacatgttcctggt

SEQ ID NO: 21457 - RNA, 94 nt, synthetic construct
  source 1..94: mol_type = other RNA
gtagtgggatcctgggtgcacacagcaaagcctctttggaggctgaatggggtcccccgactctggctttcccccaggtatacatgttcttggt

SEQ ID NO: 21458 - RNA, 94 nt, synthetic construct
  source 1..94: mol_type = other RNA
gtagtgggatcctgggtgcacacagcaaagcctctttggaggctgaatggggtcccccgactctggctttcccccaggtatacatgtttctggt

SEQ ID NO: 21459 - RNA, 94 nt, synthetic construct
  source 1..94: mol_type = other RNA
gtagtgggatcctgggtgcacacagcaaagcctctttggaggctgaatggggtcccccgactctggctttcccccaggtgtacatgttcttagt

SEQ ID NO: 21460 - RNA, 94 nt, synthetic construct
  source 1..94: mol_type = other RNA
gtagtgggatcctgggtgcacacagcaaagcctctttggaggctgaatggggtcccccgactctggctttcccccaggtatacatgtttttggt

SEQ ID NO: 21461 - RNA, 94 nt, synthetic construct
  source 1..94: mol_type = other RNA
gtagtgggatcctgggtgcacacagcaaagcctctttggaggctgaatggggtcccccgactctggctttcccccaggtttacatgttcctggt

SEQ ID NO: 21462 - RNA, 95 nt, synthetic construct
  source 1..95: mol_type = other RNA
ggtagtgggatcctgggtgcacacagcaaagcctctttggaggctgaatggggtcccccgactctggctttcccccaggtatacatgttcttggt

SEQ ID NO: 21463 - RNA, 95 nt, synthetic construct
  source 1..95: mol_type = other RNA
ggtagtgggatcctgggtgcacacagcaaagcctctttggaggctgaatggggtcccccgactctggctttcccccaggtgtacatgttcttggt

SEQ ID NO: 21464 - RNA, 95 nt, synthetic construct
  source 1..95: mol_type = other RNA
ggtagtgggatcctgggtgcacacagcaaagcctctttggaggctgaatggggtcccccgactctggctttcccccaggtatacatgtttctggt

SEQ ID NO: 21465 - RNA, 95 nt, synthetic construct
  source 1..95: mol_type = other RNA
ggtagtgggatcctgggtgcacacagcaaagcctctttggaggctgaatggggtcccccgactctggctttcccccaggtatacatgttcctggt

SEQ ID NO: 21466 - RNA, 95 nt, synthetic construct
  source 1..95: mol_type = other RNA
ggtagtgggatcctgggtgcacacagcaaagcctctttggaggctgaatggggtcccccgactctggctttcccccaggtttacatgtttctggt

SEQ ID NO: 21467 - RNA, 95 nt, synthetic construct
  source 1..95: mol_type = other RNA
ggtagtgggatcctgggtgcacacagcaaagcctctttggaggctgaatggggtcccccgactctggctttcccccaggtttacatgttcttggt

SEQ ID NO: 21468 - RNA, 95 nt, synthetic construct
  source 1..95: mol_type = other RNA
ggtagtgggatcctgggtgcacacagcaaagcctctttggaggctgaatggggtcccccgactctggctttcccccaggtatacatgttcttagt

SEQ ID NO: 21469 - RNA, 95 nt, synthetic construct
  source 1..95: mol_type = other RNA
ggtagtgggatcctgggtgcacacagcaaagcctctttggaggctgaatggggtcccccgactctggctttcccccaggtttacatgttcttagt

SEQ ID NO: 21470 - RNA, 95 nt, synthetic construct
  source 1..95: mol_type = other RNA
ggtagtgggatcctgggtgcacacagcaaagcctctttggaggctgaatggggtcccccgactctggctttcccccaggtttacatgttcctggt

SEQ ID NO: 21471 - RNA, 95 nt, synthetic construct
  source 1..95: mol_type = other RNA
ggtagtgggatcctgggtgcacacagcaaagcctctttggaggctgaatggggtcccccgactctggctttcccccaggtgtacatgtttttggt

SEQ ID NO: 21472 - RNA, 95 nt, synthetic construct
  source 1..95: mol_type = other RNA
ggtagtgggatcctgggtgcacacagcaaagcctctttggaggctgaatggggtcccccgactctggctttcccccaggtgtacatgtttttagt

SEQ ID NO: 21473 - RNA, 95 nt, synthetic construct
  source 1..95: mol_type = other RNA
ggtagtgggatcctgggtgcacacagcaaagcctctttggaggctgaatggggtcccccgactctggctttcccccaggtgtacatgtttctggt

SEQ ID NO: 21474 - RNA, 95 nt, synthetic construct
  source 1..95: mol_type = other RNA
ggtagtgggatcctgggtgcacacagcaaagcctctttggaggctgaatggggtcccccgactctggctttcccccaggtttacatgtttttagt

SEQ ID NO: 21475 - RNA, 95 nt, synthetic construct
  source 1..95: mol_type = other RNA
ggtagtgggatcctgggtgcacacagcaaagcctctttggaggctgaatggggtcccccgactctggctttcccccaggtctacatgtttttggt

SEQ ID NO: 21476 - RNA, 95 nt, synthetic construct
  source 1..95: mol_type = other RNA
ggtagtgggatcctgggtgcacacagcaaagcctctttggaggctgaatggggtcccccgactctggctttcccccaggtctacatgttcttggt

SEQ ID NO: 21477 - RNA, 95 nt, synthetic construct
  source 1..95: mol_type = other RNA
ggtagtgggatcctgggtgcacacagcaaagcctctttggaggctgaatggggtcccccgactctggctttcccccaggtgtacatgttcctggt

SEQ ID NO: 21478 - RNA, 95 nt, synthetic construct
  source 1..95: mol_type = other RNA
ggtagtgggatcctgggtgcacacagcaaagcctctttggaggctgaatggggtcccccgactctggctttcccccaggtatacatgtttttggt

SEQ ID NO: 21479 - RNA, 95 nt, synthetic construct
  source 1..95: mol_type = other RNA
ggtagtgggatcctgggtgcacacagcaaagcctctttggaggctgaatggggtcccccgactctggctttcccccaggtctacatgttcctggt

SEQ ID NO: 21480 - RNA, 95 nt, synthetic construct
  source 1..95: mol_type = other RNA
ggtagtgggatcctgggtgcacacagcaaagcctctttggaggctgaatggggtcccccgactctggctttcccccaggtctacatgttcttagt

SEQ ID NO: 21481 - RNA, 95 nt, synthetic construct
  source 1..95: mol_type = other RNA
ggtagtgggatcctgggtgcacacagcaaagcctctttggaggctgaatggggtcccccgactctggctttcccccaggtatacatgtttttagt

SEQ ID NO: 21482 - RNA, 95 nt, synthetic construct
  source 1..95: mol_type = other RNA
ggtagtgggatcctgggtgcacacagcaaagcctctttggaggctgaatggggtcccccgactctggctttcccccaggtctacatgtttctggt

SEQ ID NO: 21483 - RNA, 95 nt, synthetic construct
  source 1..95: mol_type = other RNA
ggtagtgggatcctgggtgcacacagcaaagcctctttggaggctgaatggggtcccccgactctggctttcccccaggtttacatgtttttggt

SEQ ID NO: 21484 - RNA, 95 nt, synthetic construct
  source 1..95: mol_type = other RNA
ggtagtgggatcctgggtgcacacagcaaagcctctttggaggctgaatggggtcccccgactctggctttcccccaggtctacatgtttttagt

SEQ ID NO: 21485 - RNA, 95 nt, synthetic construct
  source 1..95: mol_type = other RNA
ggtagtgggatcctgggtgcacacagcaaagcctctttggaggctgaatggggtcccccgactctggctttcccccaggtgtacatgttcttagt

SEQ ID NO: 21486 - RNA, 96 nt, synthetic construct
  source 1..96: mol_type = other RNA
gggtagtgggatcctgggtgcacacagcaaagcctctttggaggctgaatggggtcccccgactctggctttcccccaggtgtacatgtttttggt

SEQ ID NO: 21487 - RNA, 96 nt, synthetic construct
  source 1..96: mol_type = other RNA
gggtagtgggatcctgggtgcacacagcaaagcctctttggaggctgaatggggtcccccgactctggctttcccccaggtttacatgtttctggt

SEQ ID NO: 21488 - RNA, 96 nt, synthetic construct
  source 1..96: mol_type = other RNA
gggtagtgggatcctgggtgcacacagcaaagcctctttggaggctgaatggggtcccccgactctggctttcccccaggtttacatgttcttagt

SEQ ID NO: 21489 - RNA, 96 nt, synthetic construct
  source 1..96: mol_type = other RNA
gggtagtgggatcctgggtgcacacagcaaagcctctttggaggctgaatggggtcccccgactctggctttcccccaggtttacatgttcttggt

SEQ ID NO: 21490 - RNA, 96 nt, synthetic construct
  source 1..96: mol_type = other RNA
gggtagtgggatcctgggtgcacacagcaaagcctctttggaggctgaatggggtcccccgactctggctttcccccaggtgtacatgttcttagt

SEQ ID NO: 21491 - RNA, 96 nt, synthetic construct
  source 1..96: mol_type = other RNA
gggtagtgggatcctgggtgcacacagcaaagcctctttggaggctgaatggggtcccccgactctggctttcccccaggtttacatgtttttggt

SEQ ID NO: 21492 - RNA, 96 nt, synthetic construct
  source 1..96: mol_type = other RNA
gggtagtgggatcctgggtgcacacagcaaagcctctttggaggctgaatggggtcccccgactctggctttcccccaggtgtacatgttcttggt

SEQ ID NO: 21493 - RNA, 96 nt, synthetic construct
  source 1..96: mol_type = other RNA
gggtagtgggatcctgggtgcacacagcaaagcctctttggaggctgaatggggtcccccgactctggctttcccccaggtatacatgttcctggt

SEQ ID NO: 21494 - RNA, 96 nt, synthetic construct
  source 1..96: mol_type = other RNA
gggtagtgggatcctgggtgcacacagcaaagcctctttggaggctgaatggggtcccccgactctggctttcccccaggtgtacatgttcctggt

SEQ ID NO: 21495 - RNA, 96 nt, synthetic construct
  source 1..96: mol_type = other RNA
gggtagtgggatcctgggtgcacacagcaaagcctctttggaggctgaatggggtcccccgactctggctttcccccaggtctacatgtttttggt

SEQ ID NO: 21496 - RNA, 96 nt, synthetic construct
  source 1..96: mol_type = other RNA
gggtagtgggatcctgggtgcacacagcaaagcctctttggaggctgaatggggtcccccgactctggctttcccccaggtctacatgttcttagt

SEQ ID NO: 21497 - RNA, 96 nt, synthetic construct
  source 1..96: mol_type = other RNA
gggtagtgggatcctgggtgcacacagcaaagcctctttggaggctgaatggggtcccccgactctggctttcccccaggtctacatgttcctggt

SEQ ID NO: 21498 - RNA, 96 nt, synthetic construct
  source 1..96: mol_type = other RNA
gggtagtgggatcctgggtgcacacagcaaagcctctttggaggctgaatggggtcccccgactctggctttcccccaggtatacatgtttttggt

SEQ ID NO: 21499 - RNA, 96 nt, synthetic construct
  source 1..96: mol_type = other RNA
gggtagtgggatcctgggtgcacacagcaaagcctctttggaggctgaatggggtcccccgactctggctttcccccaggtatacatgtttttagt

SEQ ID NO: 21500 - RNA, 96 nt, synthetic construct
  source 1..96: mol_type = other RNA
gggtagtgggatcctgggtgcacacagcaaagcctctttggaggctgaatggggtcccccgactctggctttcccccaggtgtacatgtttttagt

SEQ ID NO: 21501 - RNA, 96 nt, synthetic construct
  source 1..96: mol_type = other RNA
gggtagtgggatcctgggtgcacacagcaaagcctctttggaggctgaatggggtcccccgactctggctttcccccaggtatacatgttcttggt

SEQ ID NO: 21502 - RNA, 96 nt, synthetic construct
  source 1..96: mol_type = other RNA
gggtagtgggatcctgggtgcacacagcaaagcctctttggaggctgaatggggtcccccgactctggctttcccccaggtttacatgtttttagt

SEQ ID NO: 21503 - RNA, 96 nt, synthetic construct
  source 1..96: mol_type = other RNA
gggtagtgggatcctgggtgcacacagcaaagcctctttggaggctgaatggggtcccccgactctggctttcccccaggtctacatgtttctggt

SEQ ID NO: 21504 - RNA, 96 nt, synthetic construct
  source 1..96: mol_type = other RNA
gggtagtgggatcctgggtgcacacagcaaagcctctttggaggctgaatggggtcccccgactctggctttcccccaggtatacatgtttctggt

SEQ ID NO: 21505 - RNA, 96 nt, synthetic construct
  source 1..96: mol_type = other RNA
gggtagtgggatcctgggtgcacacagcaaagcctctttggaggctgaatggggtcccccgactctggctttcccccaggtctacatgttcttggt

SEQ ID NO: 21506 - RNA, 96 nt, synthetic construct
  source 1..96: mol_type = other RNA
gggtagtgggatcctgggtgcacacagcaaagcctctttggaggctgaatggggtcccccgactctggctttcccccaggtatacatgttcttagt

SEQ ID NO: 21507 - RNA, 96 nt, synthetic construct
  source 1..96: mol_type = other RNA
gggtagtgggatcctgggtgcacacagcaaagcctctttggaggctgaatggggtcccccgactctggctttcccccaggtgtacatgtttctggt

SEQ ID NO: 21508 - RNA, 96 nt, synthetic construct
  source 1..96: mol_type = other RNA
gggtagtgggatcctgggtgcacacagcaaagcctctttggaggctgaatggggtcccccgactctggctttcccccaggtctacatgtttttagt

SEQ ID NO: 21509 - RNA, 96 nt, synthetic construct
  source 1..96: mol_type = other RNA
gggtagtgggatcctgggtgcacacagcaaagcctctttggaggctgaatggggtcccccgactctggctttcccccaggtttacatgttcctggt

SEQ ID NO: 21510 - RNA, 97 nt, synthetic construct
  source 1..97: mol_type = other RNA
tgggtagtgggatcctgggtgcacacagcaaagcctctttggaggctgaatggggtcccccgactctggctttcccccaggtctacatgtttttggt

SEQ ID NO: 21511 - RNA, 97 nt, synthetic construct
  source 1..97: mol_type = other RNA
tgggtagtgggatcctgggtgcacacagcaaagcctctttggaggctgaatggggtcccccgactctggctttcccccaggtttacatgttcttggt

SEQ ID NO: 21512 - RNA, 97 nt, synthetic construct
  source 1..97: mol_type = other RNA
tgggtagtgggatcctgggtgcacacagcaaagcctctttggaggctgaatggggtcccccgactctggctttcccccaggtttacatgttcctggt

SEQ ID NO: 21513 - RNA, 97 nt, synthetic construct
  source 1..97: mol_type = other RNA
tgggtagtgggatcctgggtgcacacagcaaagcctctttggaggctgaatggggtcccccgactctggctttcccccaggtgtacatgtttttggt

SEQ ID NO: 21514 - RNA, 97 nt, synthetic construct
  source 1..97: mol_type = other RNA
tgggtagtgggatcctgggtgcacacagcaaagcctctttggaggctgaatggggtcccccgactctggctttcccccaggtgtacatgtttttagt

SEQ ID NO: 21515 - RNA, 97 nt, synthetic construct
  source 1..97: mol_type = other RNA
tgggtagtgggatcctgggtgcacacagcaaagcctctttggaggctgaatggggtcccccgactctggctttcccccaggtgtacatgtttctggt

SEQ ID NO: 21516 - RNA, 97 nt, synthetic construct
  source 1..97: mol_type = other RNA
tgggtagtgggatcctgggtgcacacagcaaagcctctttggaggctgaatggggtcccccgactctggctttcccccaggtgtacatgttcttagt

SEQ ID NO: 21517 - RNA, 97 nt, synthetic construct
  source 1..97: mol_type = other RNA
tgggtagtgggatcctgggtgcacacagcaaagcctctttggaggctgaatggggtcccccgactctggctttcccccaggtgtacatgttcctggt

SEQ ID NO: 21518 - RNA, 97 nt, synthetic construct
  source 1..97: mol_type = other RNA
tgggtagtgggatcctgggtgcacacagcaaagcctctttggaggctgaatggggtcccccgactctggctttcccccaggtatacatgtttttggt

SEQ ID NO: 21519 - RNA, 97 nt, synthetic construct
  source 1..97: mol_type = other RNA
tgggtagtgggatcctgggtgcacacagcaaagcctctttggaggctgaatggggtcccccgactctggctttcccccaggtttacatgtttttggt

SEQ ID NO: 21520 - RNA, 97 nt, synthetic construct
  source 1..97: mol_type = other RNA
tgggtagtgggatcctgggtgcacacagcaaagcctctttggaggctgaatggggtcccccgactctggctttcccccaggtatacatgtttctggt

SEQ ID NO: 21521 - RNA, 97 nt, synthetic construct
  source 1..97: mol_type = other RNA
tgggtagtgggatcctgggtgcacacagcaaagcctctttggaggctgaatggggtcccccgactctggctttcccccaggtatacatgttcctggt

SEQ ID NO: 21522 - RNA, 97 nt, synthetic construct
  source 1..97: mol_type = other RNA
tgggtagtgggatcctgggtgcacacagcaaagcctctttggaggctgaatggggtcccccgactctggctttcccccaggtatacatgtttttagt

SEQ ID NO: 21523 - RNA, 97 nt, synthetic construct
  source 1..97: mol_type = other RNA
tgggtagtgggatcctgggtgcacacagcaaagcctctttggaggctgaatggggtcccccgactctggctttcccccaggtatacatgttcttggt

SEQ ID NO: 21524 - RNA, 97 nt, synthetic construct
  source 1..97: mol_type = other RNA
tgggtagtgggatcctgggtgcacacagcaaagcctctttggaggctgaatggggtcccccgactctggctttcccccaggtatacatgttcttagt

SEQ ID NO: 21525 - RNA, 97 nt, synthetic construct
  source 1..97: mol_type = other RNA
tgggtagtgggatcctgggtgcacacagcaaagcctctttggaggctgaatggggtcccccgactctggctttcccccaggtctacatgttcctggt

SEQ ID NO: 21526 - RNA, 97 nt, synthetic construct
  source 1..97: mol_type = other RNA
tgggtagtgggatcctgggtgcacacagcaaagcctctttggaggctgaatggggtcccccgactctggctttcccccaggtgtacatgttcttggt

SEQ ID NO: 21527 - RNA, 97 nt, synthetic construct
  source 1..97: mol_type = other RNA
tgggtagtgggatcctgggtgcacacagcaaagcctctttggaggctgaatggggtcccccgactctggctttcccccaggtctacatgttcttagt

SEQ ID NO: 21528 - RNA, 97 nt, synthetic construct
  source 1..97: mol_type = other RNA
tgggtagtgggatcctgggtgcacacagcaaagcctctttggaggctgaatggggtcccccgactctggctttcccccaggtttacatgtttttagt

SEQ ID NO: 21529 - RNA, 97 nt, synthetic construct
  source 1..97: mol_type = other RNA
tgggtagtgggatcctgggtgcacacagcaaagcctctttggaggctgaatggggtcccccgactctggctttcccccaggtctacatgttcttggt

SEQ ID NO: 21530 - RNA, 97 nt, synthetic construct
  source 1..97: mol_type = other RNA
tgggtagtgggatcctgggtgcacacagcaaagcctctttggaggctgaatggggtcccccgactctggctttcccccaggtctacatgtttttagt

SEQ ID NO: 21531 - RNA, 97 nt, synthetic construct
  source 1..97: mol_type = other RNA
tgggtagtgggatcctgggtgcacacagcaaagcctctttggaggctgaatggggtcccccgactctggctttcccccaggtctacatgtttctggt

SEQ ID NO: 21532 - RNA, 97 nt, synthetic construct
  source 1..97: mol_type = other RNA
tgggtagtgggatcctgggtgcacacagcaaagcctctttggaggctgaatggggtcccccgactctggctttcccccaggtttacatgtttctggt

SEQ ID NO: 21533 - RNA, 97 nt, synthetic construct
  source 1..97: mol_type = other RNA
tgggtagtgggatcctgggtgcacacagcaaagcctctttggaggctgaatggggtcccccgactctggctttcccccaggtttacatgttcttagt

SEQ ID NO: 21534 - RNA, 98 nt, synthetic construct
  source 1..98: mol_type = other RNA
gtgggtagtgggatcctgggtgcacacagcaaagcctctttggaggctgaatggggtcccccgactctggctttcccccaggtttacatgtttttggt

SEQ ID NO: 21535 - RNA, 98 nt, synthetic construct
  source 1..98: mol_type = other RNA
gtgggtagtgggatcctgggtgcacacagcaaagcctctttggaggctgaatggggtcccccgactctggctttcccccaggtctacatgtttttagt

SEQ ID NO: 21536 - RNA, 98 nt, synthetic construct
  source 1..98: mol_type = other RNA
gtgggtagtgggatcctgggtgcacacagcaaagcctctttggaggctgaatggggtcccccgactctggctttcccccaggtttacatgtttttagt

SEQ ID NO: 21537 - RNA, 98 nt, synthetic construct
  source 1..98: mol_type = other RNA
gtgggtagtgggatcctgggtgcacacagcaaagcctctttggaggctgaatggggtcccccgactctggctttcccccaggtatacatgttcctggt

SEQ ID NO: 21538 - RNA, 98 nt, synthetic construct
  source 1..98: mol_type = other RNA
gtgggtagtgggatcctgggtgcacacagcaaagcctctttggaggctgaatggggtcccccgactctggctttcccccaggtatacatgtttctggt

SEQ ID NO: 21539 - RNA, 98 nt, synthetic construct
  source 1..98: mol_type = other RNA
gtgggtagtgggatcctgggtgcacacagcaaagcctctttggaggctgaatggggtcccccgactctggctttcccccaggtctacatgttcttggt

SEQ ID NO: 21540 - RNA, 98 nt, synthetic construct
  source 1..98: mol_type = other RNA
gtgggtagtgggatcctgggtgcacacagcaaagcctctttggaggctgaatggggtcccccgactctggctttcccccaggtatacatgttcttagt

SEQ ID NO: 21541 - RNA, 98 nt, synthetic construct
  source 1..98: mol_type = other RNA
gtgggtagtgggatcctgggtgcacacagcaaagcctctttggaggctgaatggggtcccccgactctggctttcccccaggtatacatgttcttggt

SEQ ID NO: 21542 - RNA, 98 nt, synthetic construct
  source 1..98: mol_type = other RNA
gtgggtagtgggatcctgggtgcacacagcaaagcctctttggaggctgaatggggtcccccgactctggctttcccccaggtatacatgtttttggt

SEQ ID NO: 21543 - RNA, 98 nt, synthetic construct
  source 1..98: mol_type = other RNA
gtgggtagtgggatcctgggtgcacacagcaaagcctctttggaggctgaatggggtcccccgactctggctttcccccaggtatacatgtttttagt

SEQ ID NO: 21544 - RNA, 98 nt, synthetic construct
  source 1..98: mol_type = other RNA
gtgggtagtgggatcctgggtgcacacagcaaagcctctttggaggctgaatggggtcccccgactctggctttcccccaggtctacatgtttttggt

SEQ ID NO: 21545 - RNA, 98 nt, synthetic construct
  source 1..98: mol_type = other RNA
gtgggtagtgggatcctgggtgcacacagcaaagcctctttggaggctgaatggggtcccccgactctggctttcccccaggtttacatgtttctggt

SEQ ID NO: 21546 - RNA, 98 nt, synthetic construct
  source 1..98: mol_type = other RNA
gtgggtagtgggatcctgggtgcacacagcaaagcctctttggaggctgaatggggtcccccgactctggctttcccccaggtttacatgttcttggt

SEQ ID NO: 21547 - RNA, 98 nt, synthetic construct
  source 1..98: mol_type = other RNA
gtgggtagtgggatcctgggtgcacacagcaaagcctctttggaggctgaatggggtcccccgactctggctttcccccaggtttacatgttcttagt

SEQ ID NO: 21548 - RNA, 98 nt, synthetic construct
  source 1..98: mol_type = other RNA
gtgggtagtgggatcctgggtgcacacagcaaagcctctttggaggctgaatggggtcccccgactctggctttcccccaggtttacatgttcctggt

SEQ ID NO: 21549 - RNA, 98 nt, synthetic construct
  source 1..98: mol_type = other RNA
gtgggtagtgggatcctgggtgcacacagcaaagcctctttggaggctgaatggggtcccccgactctggctttcccccaggtgtacatgtttttggt

SEQ ID NO: 21550 - RNA, 98 nt, synthetic construct
  source 1..98: mol_type = other RNA
gtgggtagtgggatcctgggtgcacacagcaaagcctctttggaggctgaatggggtcccccgactctggctttcccccaggtgtacatgtttttagt

SEQ ID NO: 21551 - RNA, 98 nt, synthetic construct
  source 1..98: mol_type = other RNA
gtgggtagtgggatcctgggtgcacacagcaaagcctctttggaggctgaatggggtcccccgactctggctttcccccaggtgtacatgtttctggt

SEQ ID NO: 21552 - RNA, 98 nt, synthetic construct
  source 1..98: mol_type = other RNA
gtgggtagtgggatcctgggtgcacacagcaaagcctctttggaggctgaatggggtcccccgactctggctttcccccaggtgtacatgttcttggt

SEQ ID NO: 21553 - RNA, 98 nt, synthetic construct
  source 1..98: mol_type = other RNA
gtgggtagtgggatcctgggtgcacacagcaaagcctctttggaggctgaatggggtcccccgactctggctttcccccaggtgtacatgttcttagt

SEQ ID NO: 21554 - RNA, 98 nt, synthetic construct
  source 1..98: mol_type = other RNA
gtgggtagtgggatcctgggtgcacacagcaaagcctctttggaggctgaatggggtcccccgactctggctttcccccaggtgtacatgttcctggt

SEQ ID NO: 21555 - RNA, 98 nt, synthetic construct
  source 1..98: mol_type = other RNA
gtgggtagtgggatcctgggtgcacacagcaaagcctctttggaggctgaatggggtcccccgactctggctttcccccaggtctacatgttcttagt

SEQ ID NO: 21556 - RNA, 98 nt, synthetic construct
  source 1..98: mol_type = other RNA
gtgggtagtgggatcctgggtgcacacagcaaagcctctttggaggctgaatggggtcccccgactctggctttcccccaggtctacatgtttctggt

SEQ ID NO: 21557 - RNA, 98 nt, synthetic construct
  source 1..98: mol_type = other RNA
gtgggtagtgggatcctgggtgcacacagcaaagcctctttggaggctgaatggggtcccccgactctggctttcccccaggtctacatgttcctggt

SEQ ID NO: 21558 - RNA, 99 nt, synthetic construct
  source 1..99: mol_type = other RNA
agtgggtagtgggatcctgggtgcacacagcaaagcctctttggaggctgaatggggtcccccgactctggctttcccccaggtgtacatgttcttggt

SEQ ID NO: 21559 - RNA, 99 nt, synthetic construct
  source 1..99: mol_type = other RNA
agtgggtagtgggatcctgggtgcacacagcaaagcctctttggaggctgaatggggtcccccgactctggctttcccccaggtttacatgtttttagt

SEQ ID NO: 21560 - RNA, 99 nt, synthetic construct
  source 1..99: mol_type = other RNA
agtgggtagtgggatcctgggtgcacacagcaaagcctctttggaggctgaatggggtcccccgactctggctttcccccaggtttacatgttcttagt

SEQ ID NO: 21561 - RNA, 99 nt, synthetic construct
  source 1..99: mol_type = other RNA
agtgggtagtgggatcctgggtgcacacagcaaagcctctttggaggctgaatggggtcccccgactctggctttcccccaggtatacatgttcctggt

SEQ ID NO: 21562 - RNA, 99 nt, synthetic construct
  source 1..99: mol_type = other RNA
agtgggtagtgggatcctgggtgcacacagcaaagcctctttggaggctgaatggggtcccccgactctggctttcccccaggtatacatgtttttagt

SEQ ID NO: 21563 - RNA, 99 nt, synthetic construct
  source 1..99: mol_type = other RNA
agtgggtagtgggatcctgggtgcacacagcaaagcctctttggaggctgaatggggtcccccgactctggctttcccccaggtctacatgtttctggt

SEQ ID NO: 21564 - RNA, 99 nt, synthetic construct
  source 1..99: mol_type = other RNA
agtgggtagtgggatcctgggtgcacacagcaaagcctctttggaggctgaatggggtcccccgactctggctttcccccaggtatacatgtttttggt

SEQ ID NO: 21565 - RNA, 99 nt, synthetic construct
  source 1..99: mol_type = other RNA
agtgggtagtgggatcctgggtgcacacagcaaagcctctttggaggctgaatggggtcccccgactctggctttcccccaggtatacatgttcttagt

SEQ ID NO: 21566 - RNA, 99 nt, synthetic construct
  source 1..99: mol_type = other RNA
agtgggtagtgggatcctgggtgcacacagcaaagcctctttggaggctgaatggggtcccccgactctggctttcccccaggtatacatgttcttggt

SEQ ID NO: 21567 - RNA, 99 nt, synthetic construct
  source 1..99: mol_type = other RNA
agtgggtagtgggatcctgggtgcacacagcaaagcctctttggaggctgaatggggtcccccgactctggctttcccccaggtatacatgtttctggt

SEQ ID NO: 21568 - RNA, 99 nt, synthetic construct
  source 1..99: mol_type = other RNA
agtgggtagtgggatcctgggtgcacacagcaaagcctctttggaggctgaatggggtcccccgactctggctttcccccaggtttacatgtttttggt

SEQ ID NO: 21569 - RNA, 99 nt, synthetic construct
  source 1..99: mol_type = other RNA
agtgggtagtgggatcctgggtgcacacagcaaagcctctttggaggctgaatggggtcccccgactctggctttcccccaggtctacatgttcttagt

SEQ ID NO: 21570 - RNA, 99 nt, synthetic construct
  source 1..99: mol_type = other RNA
agtgggtagtgggatcctgggtgcacacagcaaagcctctttggaggctgaatggggtcccccgactctggctttcccccaggtgtacatgttcctggt

SEQ ID NO: 21571 - RNA, 99 nt, synthetic construct
  source 1..99: mol_type = other RNA
agtgggtagtgggatcctgggtgcacacagcaaagcctctttggaggctgaatggggtcccccgactctggctttcccccaggtgtacatgttcttagt

SEQ ID NO: 21572 - RNA, 99 nt, synthetic construct
  source 1..99: mol_type = other RNA
agtgggtagtgggatcctgggtgcacacagcaaagcctctttggaggctgaatggggtcccccgactctggctttcccccaggtgtacatgtttctggt

SEQ ID NO: 21573 - RNA, 99 nt, synthetic construct
  source 1..99: mol_type = other RNA
agtgggtagtgggatcctgggtgcacacagcaaagcctctttggaggctgaatggggtcccccgactctggctttcccccaggtctacatgttcttggt

SEQ ID NO: 21574 - RNA, 99 nt, synthetic construct
  source 1..99: mol_type = other RNA
agtgggtagtgggatcctgggtgcacacagcaaagcctctttggaggctgaatggggtcccccgactctggctttcccccaggtctacatgttcctggt

SEQ ID NO: 21575 - RNA, 99 nt, synthetic construct
  source 1..99: mol_type = other RNA
agtgggtagtgggatcctgggtgcacacagcaaagcctctttggaggctgaatggggtcccccgactctggctttcccccaggtgtacatgtttttagt

SEQ ID NO: 21576 - RNA, 99 nt, synthetic construct
  source 1..99: mol_type = other RNA
agtgggtagtgggatcctgggtgcacacagcaaagcctctttggaggctgaatggggtcccccgactctggctttcccccaggtctacatgtttttggt

SEQ ID NO: 21577 - RNA, 99 nt, synthetic construct
  source 1..99: mol_type = other RNA
agtgggtagtgggatcctgggtgcacacagcaaagcctctttggaggctgaatggggtcccccgactctggctttcccccaggtgtacatgtttttggt

SEQ ID NO: 21578 - RNA, 99 nt, synthetic construct
  source 1..99: mol_type = other RNA
agtgggtagtgggatcctgggtgcacacagcaaagcctctttggaggctgaatggggtcccccgactctggctttcccccaggtctacatgtttttagt

SEQ ID NO: 21579 - RNA, 99 nt, synthetic construct
  source 1..99: mol_type = other RNA
agtgggtagtgggatcctgggtgcacacagcaaagcctctttggaggctgaatggggtcccccgactctggctttcccccaggtttacatgttcctggt

SEQ ID NO: 21580 - RNA, 99 nt, synthetic construct
  source 1..99: mol_type = other RNA
agtgggtagtgggatcctgggtgcacacagcaaagcctctttggaggctgaatggggtcccccgactctggctttcccccaggtttacatgtttctggt

SEQ ID NO: 21581 - RNA, 99 nt, synthetic construct
  source 1..99: mol_type = other RNA
agtgggtagtgggatcctgggtgcacacagcaaagcctctttggaggctgaatggggtcccccgactctggctttcccccaggtttacatgttcttggt

SEQ ID NO: 21582 - RNA, 100 nt, synthetic construct
  source 1..100: mol_type = other RNA
cagtgggtagtgggatcctgggtgcacacagcaaagcctctttggaggctgaatggggtcccccgactctggctttcccccaggtttacatgttcctggt

SEQ ID NO: 21583 - RNA, 100 nt, synthetic construct
  source 1..100: mol_type = other RNA
cagtgggtagtgggatcctgggtgcacacagcaaagcctctttggaggctgaatggggtcccccgactctggctttcccccaggtctacatgtttttggt

SEQ ID NO: 21584 - RNA, 100 nt, synthetic construct
  source 1..100: mol_type = other RNA
cagtgggtagtgggatcctgggtgcacacagcaaagcctctttggaggctgaatggggtcccccgactctggctttcccccaggtgtacatgttcttagt

SEQ ID NO: 21585 - RNA, 100 nt, synthetic construct
  source 1..100: mol_type = other RNA
cagtgggtagtgggatcctgggtgcacacagcaaagcctctttggaggctgaatggggtcccccgactctggctttcccccaggtatacatgttcttggt

SEQ ID NO: 21586 - RNA, 100 nt, synthetic construct
  source 1..100: mol_type = other RNA
cagtgggtagtgggatcctgggtgcacacagcaaagcctctttggaggctgaatggggtcccccgactctggctttcccccaggtatacatgttcctggt

SEQ ID NO: 21587 - RNA, 100 nt, synthetic construct
  source 1..100: mol_type = other RNA
cagtgggtagtgggatcctgggtgcacacagcaaagcctctttggaggctgaatggggtcccccgactctggctttcccccaggtttacatgtttttagt

SEQ ID NO: 21588 - RNA, 100 nt, synthetic construct
  source 1..100: mol_type = other RNA
cagtgggtagtgggatcctgggtgcacacagcaaagcctctttggaggctgaatggggtcccccgactctggctttcccccaggtttacatgtttttggt

SEQ ID NO: 21589 - RNA, 100 nt, synthetic construct
  source 1..100: mol_type = other RNA
cagtgggtagtgggatcctgggtgcacacagcaaagcctctttggaggctgaatggggtcccccgactctggctttcccccaggtttacatgtttctggt

SEQ ID NO: 21590 - RNA, 100 nt, synthetic construct
  source 1..100: mol_type = other RNA
cagtgggtagtgggatcctgggtgcacacagcaaagcctctttggaggctgaatggggtcccccgactctggctttcccccaggtttacatgttcttggt

SEQ ID NO: 21591 - RNA, 100 nt, synthetic construct
  source 1..100: mol_type = other RNA
cagtgggtagtgggatcctgggtgcacacagcaaagcctctttggaggctgaatggggtcccccgactctggctttcccccaggtttacatgttcttagt

SEQ ID NO: 21592 - RNA, 100 nt, synthetic construct
  source 1..100: mol_type = other RNA
cagtgggtagtgggatcctgggtgcacacagcaaagcctctttggaggctgaatggggtcccccgactctggctttcccccaggtgtacatgtttttggt

SEQ ID NO: 21593 - RNA, 100 nt, synthetic construct
  source 1..100: mol_type = other RNA
cagtgggtagtgggatcctgggtgcacacagcaaagcctctttggaggctgaatggggtcccccgactctggctttcccccaggtgtacatgtttctggt

SEQ ID NO: 21594 - RNA, 100 nt, synthetic construct
  source 1..100: mol_type = other RNA
cagtgggtagtgggatcctgggtgcacacagcaaagcctctttggaggctgaatggggtcccccgactctggctttcccccaggtgtacatgttcttggt

SEQ ID NO: 21595 - RNA, 100 nt, synthetic construct
  source 1..100: mol_type = other RNA
cagtgggtagtgggatcctgggtgcacacagcaaagcctctttggaggctgaatggggtcccccgactctggctttcccccaggtgtacatgttcctggt

SEQ ID NO: 21596 - RNA, 100 nt, synthetic construct
  source 1..100: mol_type = other RNA
cagtgggtagtgggatcctgggtgcacacagcaaagcctctttggaggctgaatggggtcccccgactctggctttcccccaggtctacatgttcctggt

SEQ ID NO: 21597 - RNA, 100 nt, synthetic construct
  source 1..100: mol_type = other RNA
cagtgggtagtgggatcctgggtgcacacagcaaagcctctttggaggctgaatggggtcccccgactctggctttcccccaggtgtacatgtttttagt

SEQ ID NO: 21598 - RNA, 100 nt, synthetic construct
  source 1..100: mol_type = other RNA
cagtgggtagtgggatcctgggtgcacacagcaaagcctctttggaggctgaatggggtcccccgactctggctttcccccaggtatacatgtttttagt

SEQ ID NO: 21599 - RNA, 100 nt, synthetic construct
  source 1..100: mol_type = other RNA
cagtgggtagtgggatcctgggtgcacacagcaaagcctctttggaggctgaatggggtcccccgactctggctttcccccaggtatacatgtttttggt

SEQ ID NO: 21600 - RNA, 100 nt, synthetic construct
  source 1..100: mol_type = other RNA
cagtgggtagtgggatcctgggtgcacacagcaaagcctctttggaggctgaatggggtcccccgactctggctttcccccaggtatacatgtttctggt

SEQ ID NO: 21601 - RNA, 100 nt, synthetic construct
  source 1..100: mol_type = other RNA
cagtgggtagtgggatcctgggtgcacacagcaaagcctctttggaggctgaatggggtcccccgactctggctttcccccaggtctacatgttcttagt

SEQ ID NO: 21602 - RNA, 100 nt, synthetic construct
  source 1..100: mol_type = other RNA
cagtgggtagtgggatcctgggtgcacacagcaaagcctctttggaggctgaatggggtcccccgactctggctttcccccaggtctacatgttcttggt

SEQ ID NO: 21603 - RNA, 100 nt, synthetic construct
  source 1..100: mol_type = other RNA
cagtgggtagtgggatcctgggtgcacacagcaaagcctctttggaggctgaatggggtcccccgactctggctttcccccaggtctacatgtttctggt

SEQ ID NO: 21604 - RNA, 100 nt, synthetic construct
  source 1..100: mol_type = other RNA
cagtgggtagtgggatcctgggtgcacacagcaaagcctctttggaggctgaatggggtcccccgactctggctttcccccaggtctacatgtttttagt

SEQ ID NO: 21605 - RNA, 100 nt, synthetic construct
  source 1..100: mol_type = other RNA
cagtgggtagtgggatcctgggtgcacacagcaaagcctctttggaggctgaatggggtcccccgactctggctttcccccaggtatacatgttcttagt

SEQ ID NO: 21606 - RNA, 101 nt, synthetic construct
  source 1..101: mol_type = other RNA
ccagtgggtagtgggatcctgggtgcacacagcaaagcctctttggaggctgaatggggtcccccgactctggctttcccccaggtttacatgttcctggt

SEQ ID NO: 21607 - RNA, 101 nt, synthetic construct
  source 1..101: mol_type = other RNA
ccagtgggtagtgggatcctgggtgcacacagcaaagcctctttggaggctgaatggggtcccccgactctggctttcccccaggtgtacatgttcttggt

SEQ ID NO: 21608 - RNA, 101 nt, synthetic construct
  source 1..101: mol_type = other RNA
ccagtgggtagtgggatcctgggtgcacacagcaaagcctctttggaggctgaatggggtcccccgactctggctttcccccaggtgtacatgtttctggt

SEQ ID NO: 21609 - RNA, 101 nt, synthetic construct
  source 1..101: mol_type = other RNA
ccagtgggtagtgggatcctgggtgcacacagcaaagcctctttggaggctgaatggggtcccccgactctggctttcccccaggtttacatgttcttggt

SEQ ID NO: 21610 - RNA, 101 nt, synthetic construct
  source 1..101: mol_type = other RNA
ccagtgggtagtgggatcctgggtgcacacagcaaagcctctttggaggctgaatggggtcccccgactctggctttcccccaggtctacatgttcttggt

SEQ ID NO: 21611 - RNA, 101 nt, synthetic construct
  source 1..101: mol_type = other RNA
ccagtgggtagtgggatcctgggtgcacacagcaaagcctctttggaggctgaatggggtcccccgactctggctttcccccaggtttacatgttcttagt

SEQ ID NO: 21612 - RNA, 101 nt, synthetic construct
  source 1..101: mol_type = other RNA
ccagtgggtagtgggatcctgggtgcacacagcaaagcctctttggaggctgaatggggtcccccgactctggctttcccccaggtgtacatgttcctggt

SEQ ID NO: 21613 - RNA, 101 nt, synthetic construct
  source 1..101: mol_type = other RNA
ccagtgggtagtgggatcctgggtgcacacagcaaagcctctttggaggctgaatggggtcccccgactctggctttcccccaggtgtacatgtttttggt

SEQ ID NO: 21614 - RNA, 101 nt, synthetic construct
  source 1..101: mol_type = other RNA
ccagtgggtagtgggatcctgggtgcacacagcaaagcctctttggaggctgaatggggtcccccgactctggctttcccccaggtctacatgtttttggt

SEQ ID NO: 21615 - RNA, 101 nt, synthetic construct
  source 1..101: mol_type = other RNA
ccagtgggtagtgggatcctgggtgcacacagcaaagcctctttggaggctgaatggggtcccccgactctggctttcccccaggtttacatgtttttggt

SEQ ID NO: 21616 - RNA, 101 nt, synthetic construct
  source 1..101: mol_type = other RNA
ccagtgggtagtgggatcctgggtgcacacagcaaagcctctttggaggctgaatggggtcccccgactctggctttcccccaggtctacatgttcctggt

SEQ ID NO: 21617 - RNA, 101 nt, synthetic construct
  source 1..101: mol_type = other RNA
ccagtgggtagtgggatcctgggtgcacacagcaaagcctctttggaggctgaatggggtcccccgactctggctttcccccaggtgtacatgttcttagt

SEQ ID NO: 21618 - RNA, 101 nt, synthetic construct
  source 1..101: mol_type = other RNA
ccagtgggtagtgggatcctgggtgcacacagcaaagcctctttggaggctgaatggggtcccccgactctggctttcccccaggtctacatgtttttagt

SEQ ID NO: 21619 - RNA, 101 nt, synthetic construct
  source 1..101: mol_type = other RNA
ccagtgggtagtgggatcctgggtgcacacagcaaagcctctttggaggctgaatggggtcccccgactctggctttcccccaggtttacatgtttttagt

SEQ ID NO: 21620 - RNA, 101 nt, synthetic construct
  source 1..101: mol_type = other RNA
ccagtgggtagtgggatcctgggtgcacacagcaaagcctctttggaggctgaatggggtcccccgactctggctttcccccaggtctacatgtttctggt

SEQ ID NO: 21621 - RNA, 101 nt, synthetic construct
  source 1..101: mol_type = other RNA
ccagtgggtagtgggatcctgggtgcacacagcaaagcctctttggaggctgaatggggtcccccgactctggctttcccccaggtttacatgtttctggt

SEQ ID NO: 21622 - RNA, 101 nt, synthetic construct
  source 1..101: mol_type = other RNA
ccagtgggtagtgggatcctgggtgcacacagcaaagcctctttggaggctgaatggggtcccccgactctggctttcccccaggtatacatgttcctggt

SEQ ID NO: 21623 - RNA, 101 nt, synthetic construct
  source 1..101: mol_type = other RNA
ccagtgggtagtgggatcctgggtgcacacagcaaagcctctttggaggctgaatggggtcccccgactctggctttcccccaggtgtacatgtttttagt

SEQ ID NO: 21624 - RNA, 101 nt, synthetic construct
  source 1..101: mol_type = other RNA
ccagtgggtagtgggatcctgggtgcacacagcaaagcctctttggaggctgaatggggtcccccgactctggctttcccccaggtatacatgttcttagt

SEQ ID NO: 21625 - RNA, 101 nt, synthetic construct
  source 1..101: mol_type = other RNA
ccagtgggtagtgggatcctgggtgcacacagcaaagcctctttggaggctgaatggggtcccccgactctggctttcccccaggtatacatgttcttggt

SEQ ID NO: 21626 - RNA, 101 nt, synthetic construct
  source 1..101: mol_type = other RNA
ccagtgggtagtgggatcctgggtgcacacagcaaagcctctttggaggctgaatggggtcccccgactctggctttcccccaggtatacatgtttttagt

SEQ ID NO: 21627 - RNA, 101 nt, synthetic construct
  source 1..101: mol_type = other RNA
ccagtgggtagtgggatcctgggtgcacacagcaaagcctctttggaggctgaatggggtcccccgactctggctttcccccaggtatacatgtttctggt

SEQ ID NO: 21628 - RNA, 101 nt, synthetic construct
  source 1..101: mol_type = other RNA
ccagtgggtagtgggatcctgggtgcacacagcaaagcctctttggaggctgaatggggtcccccgactctggctttcccccaggtatacatgtttttggt

SEQ ID NO: 21629 - RNA, 101 nt, synthetic construct
  source 1..101: mol_type = other RNA
ccagtgggtagtgggatcctgggtgcacacagcaaagcctctttggaggctgaatggggtcccccgactctggctttcccccaggtctacatgttcttagt

SEQ ID NO: 21630 - RNA, 102 nt, synthetic construct
  source 1..102: mol_type = other RNA
tccagtgggtagtgggatcctgggtgcacacagcaaagcctctttggaggctgaatggggtcccccgactctggctttcccccaggtttacatgttcctggt

SEQ ID NO: 21631 - RNA, 102 nt, synthetic construct
  source 1..102: mol_type = other RNA
tccagtgggtagtgggatcctgggtgcacacagcaaagcctctttggaggctgaatggggtcccccgactctggctttcccccaggtatacatgtttttagt

SEQ ID NO: 21632 - RNA, 102 nt, synthetic construct
  source 1..102: mol_type = other RNA
tccagtgggtagtgggatcctgggtgcacacagcaaagcctctttggaggctgaatggggtcccccgactctggctttcccccaggtctacatgtttctggt

SEQ ID NO: 21633 - RNA, 102 nt, synthetic construct
  source 1..102: mol_type = other RNA
tccagtgggtagtgggatcctgggtgcacacagcaaagcctctttggaggctgaatggggtcccccgactctggctttcccccaggtctacatgttcttggt

SEQ ID NO: 21634 - RNA, 102 nt, synthetic construct
  source 1..102: mol_type = other RNA
tccagtgggtagtgggatcctgggtgcacacagcaaagcctctttggaggctgaatggggtcccccgactctggctttcccccaggtctacatgttcttagt

SEQ ID NO: 21635 - RNA, 102 nt, synthetic construct
  source 1..102: mol_type = other RNA
tccagtgggtagtgggatcctgggtgcacacagcaaagcctctttggaggctgaatggggtcccccgactctggctttcccccaggtatacatgttcttagt

SEQ ID NO: 21636 - RNA, 102 nt, synthetic construct
  source 1..102: mol_type = other RNA
tccagtgggtagtgggatcctgggtgcacacagcaaagcctctttggaggctgaatggggtcccccgactctggctttcccccaggtatacatgtttttggt

SEQ ID NO: 21637 - RNA, 102 nt, synthetic construct
  source 1..102: mol_type = other RNA
tccagtgggtagtgggatcctgggtgcacacagcaaagcctctttggaggctgaatggggtcccccgactctggctttcccccaggtgtacatgttcctggt

SEQ ID NO: 21638 - RNA, 102 nt, synthetic construct
  source 1..102: mol_type = other RNA
tccagtgggtagtgggatcctgggtgcacacagcaaagcctctttggaggctgaatggggtcccccgactctggctttcccccaggtatacatgtttctggt

SEQ ID NO: 21639 - RNA, 102 nt, synthetic construct
  source 1..102: mol_type = other RNA
tccagtgggtagtgggatcctgggtgcacacagcaaagcctctttggaggctgaatggggtcccccgactctggctttcccccaggtatacatgttcttggt

SEQ ID NO: 21640 - RNA, 102 nt, synthetic construct
  source 1..102: mol_type = other RNA
tccagtgggtagtgggatcctgggtgcacacagcaaagcctctttggaggctgaatggggtcccccgactctggctttcccccaggtctacatgtttttggt

SEQ ID NO: 21641 - RNA, 102 nt, synthetic construct
  source 1..102: mol_type = other RNA
tccagtgggtagtgggatcctgggtgcacacagcaaagcctctttggaggctgaatggggtcccccgactctggctttcccccaggtctacatgttcctggt

SEQ ID NO: 21642 - RNA, 102 nt, synthetic construct
  source 1..102: mol_type = other RNA
tccagtgggtagtgggatcctgggtgcacacagcaaagcctctttggaggctgaatggggtcccccgactctggctttcccccaggtgtacatgttcttggt

SEQ ID NO: 21643 - RNA, 102 nt, synthetic construct
  source 1..102: mol_type = other RNA
tccagtgggtagtgggatcctgggtgcacacagcaaagcctctttggaggctgaatggggtcccccgactctggctttcccccaggtgtacatgtttctggt

SEQ ID NO: 21644 - RNA, 102 nt, synthetic construct
  source 1..102: mol_type = other RNA
tccagtgggtagtgggatcctgggtgcacacagcaaagcctctttggaggctgaatggggtcccccgactctggctttcccccaggtctacatgtttttagt

SEQ ID NO: 21645 - RNA, 102 nt, synthetic construct
  source 1..102: mol_type = other RNA
tccagtgggtagtgggatcctgggtgcacacagcaaagcctctttggaggctgaatggggtcccccgactctggctttcccccaggtgtacatgtttttagt

SEQ ID NO: 21646 - RNA, 102 nt, synthetic construct
  source 1..102: mol_type = other RNA
tccagtgggtagtgggatcctgggtgcacacagcaaagcctctttggaggctgaatggggtcccccgactctggctttcccccaggtgtacatgtttttggt

SEQ ID NO: 21647 - RNA, 102 nt, synthetic construct
  source 1..102: mol_type = other RNA
tccagtgggtagtgggatcctgggtgcacacagcaaagcctctttggaggctgaatggggtcccccgactctggctttcccccaggtgtacatgttcttagt

SEQ ID NO: 21648 - RNA, 102 nt, synthetic construct
  source 1..102: mol_type = other RNA
tccagtgggtagtgggatcctgggtgcacacagcaaagcctctttggaggctgaatggggtcccccgactctggctttcccccaggtttacatgtttttggt

SEQ ID NO: 21649 - RNA, 102 nt, synthetic construct
  source 1..102: mol_type = other RNA
tccagtgggtagtgggatcctgggtgcacacagcaaagcctctttggaggctgaatggggtcccccgactctggctttcccccaggtatacatgttcctggt

SEQ ID NO: 21650 - RNA, 102 nt, synthetic construct
  source 1..102: mol_type = other RNA
tccagtgggtagtgggatcctgggtgcacacagcaaagcctctttggaggctgaatggggtcccccgactctggctttcccccaggtttacatgtttttagt

SEQ ID NO: 21651 - RNA, 102 nt, synthetic construct
  source 1..102: mol_type = other RNA
tccagtgggtagtgggatcctgggtgcacacagcaaagcctctttggaggctgaatggggtcccccgactctggctttcccccaggtttacatgtttctggt

SEQ ID NO: 21652 - RNA, 102 nt, synthetic construct
  source 1..102: mol_type = other RNA
tccagtgggtagtgggatcctgggtgcacacagcaaagcctctttggaggctgaatggggtcccccgactctggctttcccccaggtttacatgttcttggt

SEQ ID NO: 21653 - RNA, 102 nt, synthetic construct
  source 1..102: mol_type = other RNA
tccagtgggtagtgggatcctgggtgcacacagcaaagcctctttggaggctgaatggggtcccccgactctggctttcccccaggtttacatgttcttagt

SEQ ID NO: 21654 - RNA, 103 nt, synthetic construct
  source 1..103: mol_type = other RNA
ctccagtgggtagtgggatcctgggtgcacacagcaaagcctctttggaggctgaatggggtcccccgactctggctttcccccaggtttacatgttcttggt

SEQ ID NO: 21655 - RNA, 103 nt, synthetic construct
  source 1..103: mol_type = other RNA
ctccagtgggtagtgggatcctgggtgcacacagcaaagcctctttggaggctgaatggggtcccccgactctggctttcccccaggtttacatgttcttagt

SEQ ID NO: 21656 - RNA, 103 nt, synthetic construct
  source 1..103: mol_type = other RNA
ctccagtgggtagtgggatcctgggtgcacacagcaaagcctctttggaggctgaatggggtcccccgactctggctttcccccaggtttacatgttcctggt

SEQ ID NO: 21657 - RNA, 103 nt, synthetic construct
  source 1..103: mol_type = other RNA
ctccagtgggtagtgggatcctgggtgcacacagcaaagcctctttggaggctgaatggggtcccccgactctggctttcccccaggtgtacatgtttttggt

SEQ ID NO: 21658 - RNA, 103 nt, synthetic construct
  source 1..103: mol_type = other RNA
ctccagtgggtagtgggatcctgggtgcacacagcaaagcctctttggaggctgaatggggtcccccgactctggctttcccccaggtgtacatgtttttagt

SEQ ID NO: 21659 - RNA, 103 nt, synthetic construct
  source 1..103: mol_type = other RNA
ctccagtgggtagtgggatcctgggtgcacacagcaaagcctctttggaggctgaatggggtcccccgactctggctttcccccaggtgtacatgtttctggt

SEQ ID NO: 21660 - RNA, 103 nt, synthetic construct
  source 1..103: mol_type = other RNA
ctccagtgggtagtgggatcctgggtgcacacagcaaagcctctttggaggctgaatggggtcccccgactctggctttcccccaggtgtacatgttcttggt

SEQ ID NO: 21661 - RNA, 103 nt, synthetic construct
  source 1..103: mol_type = other RNA
ctccagtgggtagtgggatcctgggtgcacacagcaaagcctctttggaggctgaatggggtcccccgactctggctttcccccaggtgtacatgttcttagt

SEQ ID NO: 21662 - RNA, 103 nt, synthetic construct
  source 1..103: mol_type = other RNA
ctccagtgggtagtgggatcctgggtgcacacagcaaagcctctttggaggctgaatggggtcccccgactctggctttcccccaggtctacatgtttttggt

SEQ ID NO: 21663 - RNA, 103 nt, synthetic construct
  source 1..103: mol_type = other RNA
ctccagtgggtagtgggatcctgggtgcacacagcaaagcctctttggaggctgaatggggtcccccgactctggctttcccccaggtctacatgtttctggt

SEQ ID NO: 21664 - RNA, 103 nt, synthetic construct
  source 1..103: mol_type = other RNA
ctccagtgggtagtgggatcctgggtgcacacagcaaagcctctttggaggctgaatggggtcccccgactctggctttcccccaggtttacatgtttttagt

SEQ ID NO: 21665 - RNA, 103 nt, synthetic construct
  source 1..103: mol_type = other RNA
ctccagtgggtagtgggatcctgggtgcacacagcaaagcctctttggaggctgaatggggtcccccgactctggctttcccccaggtctacatgttcttggt

SEQ ID NO: 21666 - RNA, 103 nt, synthetic construct
  source 1..103: mol_type = other RNA
ctccagtgggtagtgggatcctgggtgcacacagcaaagcctctttggaggctgaatggggtcccccgactctggctttcccccaggtctacatgttcttagt

SEQ ID NO: 21667 - RNA, 103 nt, synthetic construct
  source 1..103: mol_type = other RNA
ctccagtgggtagtgggatcctgggtgcacacagcaaagcctctttggaggctgaatggggtcccccgactctggctttcccccaggtctacatgttcctggt

SEQ ID NO: 21668 - RNA, 103 nt, synthetic construct
  source 1..103: mol_type = other RNA
ctccagtgggtagtgggatcctgggtgcacacagcaaagcctctttggaggctgaatggggtcccccgactctggctttcccccaggtatacatgtttttggt

SEQ ID NO: 21669 - RNA, 103 nt, synthetic construct
  source 1..103: mol_type = other RNA
ctccagtgggtagtgggatcctgggtgcacacagcaaagcctctttggaggctgaatggggtcccccgactctggctttcccccaggtatacatgtttctggt

SEQ ID NO: 21670 - RNA, 103 nt, synthetic construct
  source 1..103: mol_type = other RNA
ctccagtgggtagtgggatcctgggtgcacacagcaaagcctctttggaggctgaatggggtcccccgactctggctttcccccaggtatacatgttcttggt

SEQ ID NO: 21671 - RNA, 103 nt, synthetic construct
  source 1..103: mol_type = other RNA
ctccagtgggtagtgggatcctgggtgcacacagcaaagcctctttggaggctgaatggggtcccccgactctggctttcccccaggtatacatgttcttagt

SEQ ID NO: 21672 - RNA, 103 nt, synthetic construct
  source 1..103: mol_type = other RNA
ctccagtgggtagtgggatcctgggtgcacacagcaaagcctctttggaggctgaatggggtcccccgactctggctttcccccaggtatacatgttcctggt

SEQ ID NO: 21673 - RNA, 103 nt, synthetic construct
  source 1..103: mol_type = other RNA
ctccagtgggtagtgggatcctgggtgcacacagcaaagcctctttggaggctgaatggggtcccccgactctggctttcccccaggtttacatgtttctggt

SEQ ID NO: 21674 - RNA, 103 nt, synthetic construct
  source 1..103: mol_type = other RNA
ctccagtgggtagtgggatcctgggtgcacacagcaaagcctctttggaggctgaatggggtcccccgactctggctttcccccaggtctacatgtttttagt

SEQ ID NO: 21675 - RNA, 103 nt, synthetic construct
  source 1..103: mol_type = other RNA
ctccagtgggtagtgggatcctgggtgcacacagcaaagcctctttggaggctgaatggggtcccccgactctggctttcccccaggtatacatgtttttagt

SEQ ID NO: 21676 - RNA, 103 nt, synthetic construct
  source 1..103: mol_type = other RNA
ctccagtgggtagtgggatcctgggtgcacacagcaaagcctctttggaggctgaatggggtcccccgactctggctttcccccaggtttacatgtttttggt

SEQ ID NO: 21677 - RNA, 103 nt, synthetic construct
  source 1..103: mol_type = other RNA
ctccagtgggtagtgggatcctgggtgcacacagcaaagcctctttggaggctgaatggggtcccccgactctggctttcccccaggtgtacatgttcctggt

SEQ ID NO: 21678 - RNA, 20 nt, synthetic construct
  source 1..20: mol_type = other RNA
cccccaggtgtacatgtttt

SEQ ID NO: 21679 - RNA, 20 nt, synthetic construct
  source 1..20: mol_type = other RNA
ccaggtctacatgttcttgg

SEQ ID NO: 21680 - RNA, 20 nt, synthetic construct
  source 1..20: mol_type = other RNA
ccaggtttacatgttcttgg

SEQ ID NO: 21681 - RNA, 20 nt, synthetic construct
  source 1..20: mol_type = other RNA
ccaggtctacatgttcttag

SEQ ID NO: 21682 - RNA, 20 nt, synthetic construct
  source 1..20: mol_type = other RNA
ccaggtgtacatgttcttgg

SEQ ID NO: 21683 - RNA, 20 nt, synthetic construct
  source 1..20: mol_type = other RNA
ccaggtgtacatgttcttag

SEQ ID NO: 21684 - RNA, 20 nt, synthetic construct
  source 1..20: mol_type = other RNA
ccccaggtgtacatgttctt

SEQ ID NO: 21685 - RNA, 20 nt, synthetic construct
  source 1..20: mol_type = other RNA
ccaggtatacatgttcttgg

SEQ ID NO: 21686 - RNA, 20 nt, synthetic construct
  source 1..20: mol_type = other RNA
ccaggtatacatgttcttag

SEQ ID NO: 21687 - RNA, 20 nt, synthetic construct
  source 1..20: mol_type = other RNA
ccaggtttacatgttcttag

SEQ ID NO: 21688 - RNA, 20 nt, synthetic construct
  source 1..20: mol_type = other RNA
cccccaggtgtacatgtttc

SEQ ID NO: 21689 - RNA, 20 nt, synthetic construct
  source 1..20: mol_type = other RNA
cccccaggtatacatgtttc

SEQ ID NO: 21690 - RNA, 20 nt, synthetic construct
  source 1..20: mol_type = other RNA
cccccaggtgtacatgttct

SEQ ID NO: 21691 - RNA, 20 nt, synthetic construct
  source 1..20: mol_type = other RNA
cccccaggtttacatgtttt

SEQ ID NO: 21692 - RNA, 20 nt, synthetic construct
  source 1..20: mol_type = other RNA
cccccaggtttacatgtttc

SEQ ID NO: 21693 - RNA, 20 nt, synthetic construct
  source 1..20: mol_type = other RNA
ccccaggtttacatgttctt

SEQ ID NO: 21694 - RNA, 20 nt, synthetic construct
  source 1..20: mol_type = other RNA
cccccaggtttacatgttct

SEQ ID NO: 21695 - RNA, 20 nt, synthetic construct
  source 1..20: mol_type = other RNA
cccccaggtctacatgtttc

SEQ ID NO: 21696 - RNA, 20 nt, synthetic construct
  source 1..20: mol_type = other RNA
ccccaggtatacatgttctt

SEQ ID NO: 21697 - RNA, 20 nt, synthetic construct
  source 1..20: mol_type = other RNA
cccccaggtctacatgtttt

SEQ ID NO: 21698 - RNA, 20 nt, synthetic construct
  source 1..20: mol_type = other RNA
cccccaggtctacatgttct

SEQ ID NO: 21699 - RNA, 20 nt, synthetic construct
  source 1..20: mol_type = other RNA
ccccaggtctacatgttctt

SEQ ID NO: 21700 - RNA, 20 nt, synthetic construct
  source 1..20: mol_type = other RNA
cccccaggtatacatgttct

SEQ ID NO: 21701 - RNA, 20 nt, synthetic construct
  source 1..20: mol_type = other RNA
cccccaggtatacatgtttt

SEQ ID NO: 21702 - RNA, 16 nt, synthetic construct
  source 1..16: mol_type = other RNA
ctcaccccaatcctct

SEQ ID NO: 21703 - RNA, 17 nt, synthetic construct
  source 1..17: mol_type = other RNA
cctcaccccaatcctct

SEQ ID NO: 21704 - RNA, 18 nt, synthetic construct
  source 1..18: mol_type = other RNA
tcctcaccccaatcctct

SEQ ID NO: 21705 - RNA, 19 nt, synthetic construct
  source 1..19: mol_type = other RNA
gtcctcaccccaatcctct

SEQ ID NO: 21706 - RNA, 20 nt, synthetic construct
  source 1..20: mol_type = other RNA
ggtcctcaccccaatcctct

SEQ ID NO: 21707 - RNA, 21 nt, synthetic construct
  source 1..21: mol_type = other RNA
tggtcctcaccccaatcctct

SEQ ID NO: 21708 - RNA, 22 nt, synthetic construct
  source 1..22: mol_type = other RNA
atggtcctcaccccaatcctct

SEQ ID NO: 21709-21714 - skipped (6 entries)

SEQ ID NO: 21715 - RNA, 10 nt, synthetic construct
  source 1..10: mol_type = other RNA
ggattggggt

SEQ ID NO: 21716 - RNA, 11 nt, synthetic construct
  source 1..11: mol_type = other RNA
ggattggggtg

SEQ ID NO: 21717 - RNA, 12 nt, synthetic construct
  source 1..12: mol_type = other RNA
ggattggggtga

SEQ ID NO: 21718 - RNA, 13 nt, synthetic construct
  source 1..13: mol_type = other RNA
ggattggggtgag

SEQ ID NO: 21719 - RNA, 14 nt, synthetic construct
  source 1..14: mol_type = other RNA
ggattggggtgagg

SEQ ID NO: 21720 - RNA, 15 nt, synthetic construct
  source 1..15: mol_type = other RNA
ggattggggtgagga

SEQ ID NO: 21721 - RNA, 16 nt, synthetic construct
  source 1..16: mol_type = other RNA
ggattggggtgaggac

SEQ ID NO: 21722 - RNA, 17 nt, synthetic construct
  source 1..17: mol_type = other RNA
ggattggggtgaggacc

SEQ ID NO: 21723 - RNA, 18 nt, synthetic construct
  source 1..18: mol_type = other RNA
ggattggggtgaggacca

SEQ ID NO: 21724 - RNA, 19 nt, synthetic construct
  source 1..19: mol_type = other RNA
ggattggggtgaggaccat

SEQ ID NO: 21725 - RNA, 98 nt, synthetic construct
  source 1..98: mol_type = other RNA
acctgggggaaagccagagtcgggggaccccattcagcctccaaagaggctttgctgtgtgcacccaggatcccactacccactggaggaagcccaga

SEQ ID NO: 21726 - RNA, 99 nt, synthetic construct
  source 1..99: mol_type = other RNA
gacctgggggaaagccagagtcgggggaccccattcagcctccaaagaggctttgctgtgtgcacccaggatcccactacccactggaggaagcccaga

SEQ ID NO: 21727 - RNA, 99 nt, synthetic construct
  source 1..99: mol_type = other RNA
tacctgggggaaagccagagtcgggggaccccattcagcctccaaagaggctttgctgtgtgcacccaggatcccactacccactggaggaagcccaga

SEQ ID NO: 21728 - RNA, 99 nt, synthetic construct
  source 1..99: mol_type = other RNA
aacctgggggaaagccagagtcgggggaccccattcagcctccaaagaggctttgctgtgtgcacccaggatcccactacccactggaggaagcccaga

SEQ ID NO: 21729 - RNA, 99 nt, synthetic construct
  source 1..99: mol_type = other RNA
cacctgggggaaagccagagtcgggggaccccattcagcctccaaagaggctttgctgtgtgcacccaggatcccactacccactggaggaagcccaga

SEQ ID NO: 21730 - RNA, 100 nt, synthetic construct
  source 1..100: mol_type = other RNA
atacctgggggaaagccagagtcgggggaccccattcagcctccaaagaggctttgctgtgtgcacccaggatcccactacccactggaggaagcccaga

SEQ ID NO: 21731 - RNA, 100 nt, synthetic construct
  source 1..100: mol_type = other RNA
aaacctgggggaaagccagagtcgggggaccccattcagcctccaaagaggctttgctgtgtgcacccaggatcccactacccactggaggaagcccaga

SEQ ID NO: 21732 - RNA, 100 nt, synthetic construct
  source 1..100: mol_type = other RNA
acacctgggggaaagccagagtcgggggaccccattcagcctccaaagaggctttgctgtgtgcacccaggatcccactacccactggaggaagcccaga

SEQ ID NO: 21733 - RNA, 100 nt, synthetic construct
  source 1..100: mol_type = other RNA
agacctgggggaaagccagagtcgggggaccccattcagcctccaaagaggctttgctgtgtgcacccaggatcccactacccactggaggaagcccaga

SEQ ID NO: 21734 - RNA, 101 nt, synthetic construct
  source 1..101: mol_type = other RNA
tacacctgggggaaagccagagtcgggggaccccattcagcctccaaagaggctttgctgtgtgcacccaggatcccactacccactggaggaagcccaga

SEQ ID NO: 21735 - RNA, 101 nt, synthetic construct
  source 1..101: mol_type = other RNA
tatacctgggggaaagccagagtcgggggaccccattcagcctccaaagaggctttgctgtgtgcacccaggatcccactacccactggaggaagcccaga

SEQ ID NO: 21736 - RNA, 101 nt, synthetic construct
  source 1..101: mol_type = other RNA
tagacctgggggaaagccagagtcgggggaccccattcagcctccaaagaggctttgctgtgtgcacccaggatcccactacccactggaggaagcccaga

SEQ ID NO: 21737 - RNA, 101 nt, synthetic construct
  source 1..101: mol_type = other RNA
taaacctgggggaaagccagagtcgggggaccccattcagcctccaaagaggctttgctgtgtgcacccaggatcccactacccactggaggaagcccaga

SEQ ID NO: 21738 - RNA, 102 nt, synthetic construct
  source 1..102: mol_type = other RNA
gtaaacctgggggaaagccagagtcgggggaccccattcagcctccaaagaggctttgctgtgtgcacccaggatcccactacccactggaggaagcccaga

SEQ ID NO: 21739 - RNA, 102 nt, synthetic construct
  source 1..102: mol_type = other RNA
gtacacctgggggaaagccagagtcgggggaccccattcagcctccaaagaggctttgctgtgtgcacccaggatcccactacccactggaggaagcccaga

SEQ ID NO: 21740 - RNA, 102 nt, synthetic construct
  source 1..102: mol_type = other RNA
gtatacctgggggaaagccagagtcgggggaccccattcagcctccaaagaggctttgctgtgtgcacccaggatcccactacccactggaggaagcccaga

SEQ ID NO: 21741 - RNA, 102 nt, synthetic construct
  source 1..102: mol_type = other RNA
gtagacctgggggaaagccagagtcgggggaccccattcagcctccaaagaggctttgctgtgtgcacccaggatcccactacccactggaggaagcccaga

SEQ ID NO: 21742 - RNA, 103 nt, synthetic construct
  source 1..103: mol_type = other RNA
tgtatacctgggggaaagccagagtcgggggaccccattcagcctccaaagaggctttgctgtgtgcacccaggatcccactacccactggaggaagcccaga

SEQ ID NO: 21743 - RNA, 103 nt, synthetic construct
  source 1..103: mol_type = other RNA
tgtaaacctgggggaaagccagagtcgggggaccccattcagcctccaaagaggctttgctgtgtgcacccaggatcccactacccactggaggaagcccaga

SEQ ID NO: 21744 - RNA, 103 nt, synthetic construct
  source 1..103: mol_type = other RNA
tgtacacctgggggaaagccagagtcgggggaccccattcagcctccaaagaggctttgctgtgtgcacccaggatcccactacccactggaggaagcccaga

SEQ ID NO: 21745 - RNA, 103 nt, synthetic construct
  source 1..103: mol_type = other RNA
tgtagacctgggggaaagccagagtcgggggaccccattcagcctccaaagaggctttgctgtgtgcacccaggatcccactacccactggaggaagcccaga

SEQ ID NO: 21746 - RNA, 16 nt, synthetic construct
  source 1..16: mol_type = other RNA
catccccacactcaca

SEQ ID NO: 21747 - RNA, 17 nt, synthetic construct
  source 1..17: mol_type = other RNA
ccatccccacactcaca

SEQ ID NO: 21748 - RNA, 18 nt, synthetic construct
  source 1..18: mol_type = other RNA
tccatccccacactcaca

SEQ ID NO: 21749 - RNA, 19 nt, synthetic construct
  source 1..19: mol_type = other RNA
ctccatccccacactcaca

SEQ ID NO: 21750 - RNA, 20 nt, synthetic construct
  source 1..20: mol_type = other RNA
cctccatccccacactcaca

SEQ ID NO: 21751 - RNA, 21 nt, synthetic construct
  source 1..21: mol_type = other RNA
tcctccatccccacactcaca

SEQ ID NO: 21752 - RNA, 22 nt, synthetic construct
  source 1..22: mol_type = other RNA
ctcctccatccccacactcaca

SEQ ID NO: 21753-21758 - skipped (6 entries)

SEQ ID NO: 21759 - RNA, 10 nt, synthetic construct
  source 1..10: mol_type = other RNA
gagtgtgggg

SEQ ID NO: 21760 - RNA, 11 nt, synthetic construct
  source 1..11: mol_type = other RNA
gagtgtgggga

SEQ ID NO: 21761 - RNA, 12 nt, synthetic construct
  source 1..12: mol_type = other RNA
gagtgtggggat

SEQ ID NO: 21762 - RNA, 13 nt, synthetic construct
  source 1..13: mol_type = other RNA
gagtgtggggatg

SEQ ID NO: 21763 - RNA, 14 nt, synthetic construct
  source 1..14: mol_type = other RNA
gagtgtggggatgg

SEQ ID NO: 21764 - RNA, 15 nt, synthetic construct
  source 1..15: mol_type = other RNA
gagtgtggggatgga

SEQ ID NO: 21765 - RNA, 16 nt, synthetic construct
  source 1..16: mol_type = other RNA
gagtgtggggatggag

SEQ ID NO: 21766 - RNA, 17 nt, synthetic construct
  source 1..17: mol_type = other RNA
gagtgtggggatggagg

SEQ ID NO: 21767 - RNA, 18 nt, synthetic construct
  source 1..18: mol_type = other RNA
gagtgtggggatggagga

SEQ ID NO: 21768 - RNA, 19 nt, synthetic construct
  source 1..19: mol_type = other RNA
gagtgtggggatggaggag

SEQ ID NO: 21769 - RNA, 83 nt, synthetic construct
  source 1..83: mol_type = other RNA
gtatacatgttcctggtgaaatggcaggacctgtcggagaaggtggtctaccggcgcttcaccgagatctacgagttccatgt

SEQ ID NO: 21770 - RNA, 83 nt, synthetic construct
  source 1..83: mol_type = other RNA
gtatacatgttcctggtgaaatggcaggacctgtcggagaaggtggtctaccggcgcttcaccgagatctacgagtttcatgt

SEQ ID NO: 21771 - RNA, 83 nt, synthetic construct
  source 1..83: mol_type = other RNA
gtctacatgttcctggtgaaatggcaggacctgtcggagaaggtggtctaccggcgcttcaccgagatctacgagttccatgt

SEQ ID NO: 21772 - RNA, 83 nt, synthetic construct
  source 1..83: mol_type = other RNA
gtctacatgttcctggtgaaatggcaggacctgtcggagaaggtggtctaccggcgcttcaccgagatctacgagtttcatgt

SEQ ID NO: 21773 - RNA, 83 nt, synthetic construct
  source 1..83: mol_type = other RNA
gtgtacatgttcctggtgaaatggcaggacctgtcggagaaggtggtctaccggcgcttcaccgagatctacgagttccatgt

SEQ ID NO: 21774 - RNA, 83 nt, synthetic construct
  source 1..83: mol_type = other RNA
gtgtacatgttcctggtgaaatggcaggacctgtcggagaaggtggtctaccggcgcttcaccgagatctacgagtttcatgt

SEQ ID NO: 21775 - RNA, 83 nt, synthetic construct
  source 1..83: mol_type = other RNA
gtttacatgttcctggtgaaatggcaggacctgtcggagaaggtggtctaccggcgcttcaccgagatctacgagtttcatgt

SEQ ID NO: 21776 - RNA, 83 nt, synthetic construct
  source 1..83: mol_type = other RNA
gtttacatgttcctggtgaaatggcaggacctgtcggagaaggtggtctaccggcgcttcaccgagatctacgagttccatgt

SEQ ID NO: 21777 - RNA, 84 nt, synthetic construct
  source 1..84: mol_type = other RNA
ggtgtacatgttcctggtgaaatggcaggacctgtcggagaaggtggtctaccggcgcttcaccgagatctacgagtttcatgt

SEQ ID NO: 21778 - RNA, 84 nt, synthetic construct
  source 1..84: mol_type = other RNA
ggtctacatgttcctggtgaaatggcaggacctgtcggagaaggtggtctaccggcgcttcaccgagatctacgagttccatgt

SEQ ID NO: 21779 - RNA, 84 nt, synthetic construct
  source 1..84: mol_type = other RNA
ggtctacatgttcctggtgaaatggcaggacctgtcggagaaggtggtctaccggcgcttcaccgagatctacgagtttcatgt

SEQ ID NO: 21780 - RNA, 84 nt, synthetic construct
  source 1..84: mol_type = other RNA
ggtgtacatgttcctggtgaaatggcaggacctgtcggagaaggtggtctaccggcgcttcaccgagatctacgagttccatgt

SEQ ID NO: 21781 - RNA, 84 nt, synthetic construct
  source 1..84: mol_type = other RNA
ggtatacatgttcctggtgaaatggcaggacctgtcggagaaggtggtctaccggcgcttcaccgagatctacgagtttcatgt

SEQ ID NO: 21782 - RNA, 84 nt, synthetic construct
  source 1..84: mol_type = other RNA
ggtttacatgttcctggtgaaatggcaggacctgtcggagaaggtggtctaccggcgcttcaccgagatctacgagttccatgt

SEQ ID NO: 21783 - RNA, 84 nt, synthetic construct
  source 1..84: mol_type = other RNA
ggtttacatgttcctggtgaaatggcaggacctgtcggagaaggtggtctaccggcgcttcaccgagatctacgagtttcatgt

SEQ ID NO: 21784 - RNA, 84 nt, synthetic construct
  source 1..84: mol_type = other RNA
ggtatacatgttcctggtgaaatggcaggacctgtcggagaaggtggtctaccggcgcttcaccgagatctacgagttccatgt

SEQ ID NO: 21785 - RNA, 85 nt, synthetic construct
  source 1..85: mol_type = other RNA
aggtatacatgttcctggtgaaatggcaggacctgtcggagaaggtggtctaccggcgcttcaccgagatctacgagttccatgt

SEQ ID NO: 21786 - RNA, 85 nt, synthetic construct
  source 1..85: mol_type = other RNA
aggtatacatgttcctggtgaaatggcaggacctgtcggagaaggtggtctaccggcgcttcaccgagatctacgagtttcatgt

SEQ ID NO: 21787 - RNA, 85 nt, synthetic construct
  source 1..85: mol_type = other RNA
aggtgtacatgttcctggtgaaatggcaggacctgtcggagaaggtggtctaccggcgcttcaccgagatctacgagttccatgt

SEQ ID NO: 21788 - RNA, 85 nt, synthetic construct
  source 1..85: mol_type = other RNA
aggtctacatgttcctggtgaaatggcaggacctgtcggagaaggtggtctaccggcgcttcaccgagatctacgagttccatgt

SEQ ID NO: 21789 - RNA, 85 nt, synthetic construct
  source 1..85: mol_type = other RNA
aggtttacatgttcctggtgaaatggcaggacctgtcggagaaggtggtctaccggcgcttcaccgagatctacgagtttcatgt

SEQ ID NO: 21790 - RNA, 85 nt, synthetic construct
  source 1..85: mol_type = other RNA
aggtgtacatgttcctggtgaaatggcaggacctgtcggagaaggtggtctaccggcgcttcaccgagatctacgagtttcatgt

SEQ ID NO: 21791 - RNA, 85 nt, synthetic construct
  source 1..85: mol_type = other RNA
aggtctacatgttcctggtgaaatggcaggacctgtcggagaaggtggtctaccggcgcttcaccgagatctacgagtttcatgt

SEQ ID NO: 21792 - RNA, 85 nt, synthetic construct
  source 1..85: mol_type = other RNA
aggtttacatgttcctggtgaaatggcaggacctgtcggagaaggtggtctaccggcgcttcaccgagatctacgagttccatgt

SEQ ID NO: 21793 - RNA, 86 nt, synthetic construct
  source 1..86: mol_type = other RNA
caggtatacatgttcctggtgaaatggcaggacctgtcggagaaggtggtctaccggcgcttcaccgagatctacgagtttcatgt

SEQ ID NO: 21794 - RNA, 86 nt, synthetic construct
  source 1..86: mol_type = other RNA
caggtttacatgttcctggtgaaatggcaggacctgtcggagaaggtggtctaccggcgcttcaccgagatctacgagtttcatgt

SEQ ID NO: 21795 - RNA, 86 nt, synthetic construct
  source 1..86: mol_type = other RNA
caggtgtacatgttcctggtgaaatggcaggacctgtcggagaaggtggtctaccggcgcttcaccgagatctacgagtttcatgt

SEQ ID NO: 21796 - RNA, 86 nt, synthetic construct
  source 1..86: mol_type = other RNA
caggtctacatgttcctggtgaaatggcaggacctgtcggagaaggtggtctaccggcgcttcaccgagatctacgagttccatgt

SEQ ID NO: 21797 - RNA, 86 nt, synthetic construct
  source 1..86: mol_type = other RNA
caggtctacatgttcctggtgaaatggcaggacctgtcggagaaggtggtctaccggcgcttcaccgagatctacgagtttcatgt

SEQ ID NO: 21798 - RNA, 86 nt, synthetic construct
  source 1..86: mol_type = other RNA
caggtttacatgttcctggtgaaatggcaggacctgtcggagaaggtggtctaccggcgcttcaccgagatctacgagttccatgt

SEQ ID NO: 21799 - RNA, 86 nt, synthetic construct
  source 1..86: mol_type = other RNA
caggtgtacatgttcctggtgaaatggcaggacctgtcggagaaggtggtctaccggcgcttcaccgagatctacgagttccatgt

SEQ ID NO: 21800 - RNA, 86 nt, synthetic construct
  source 1..86: mol_type = other RNA
caggtatacatgttcctggtgaaatggcaggacctgtcggagaaggtggtctaccggcgcttcaccgagatctacgagttccatgt

SEQ ID NO: 21801 - RNA, 87 nt, synthetic construct
  source 1..87: mol_type = other RNA
ccaggtttacatgttcctggtgaaatggcaggacctgtcggagaaggtggtctaccggcgcttcaccgagatctacgagttccatgt

SEQ ID NO: 21802 - RNA, 87 nt, synthetic construct
  source 1..87: mol_type = other RNA
ccaggtgtacatgttcctggtgaaatggcaggacctgtcggagaaggtggtctaccggcgcttcaccgagatctacgagtttcatgt

SEQ ID NO: 21803 - RNA, 87 nt, synthetic construct
  source 1..87: mol_type = other RNA
ccaggtatacatgttcctggtgaaatggcaggacctgtcggagaaggtggtctaccggcgcttcaccgagatctacgagtttcatgt

SEQ ID NO: 21804 - RNA, 87 nt, synthetic construct
  source 1..87: mol_type = other RNA
ccaggtttacatgttcctggtgaaatggcaggacctgtcggagaaggtggtctaccggcgcttcaccgagatctacgagtttcatgt

SEQ ID NO: 21805 - RNA, 87 nt, synthetic construct
  source 1..87: mol_type = other RNA
ccaggtctacatgttcctggtgaaatggcaggacctgtcggagaaggtggtctaccggcgcttcaccgagatctacgagttccatgt

SEQ ID NO: 21806 - RNA, 87 nt, synthetic construct
  source 1..87: mol_type = other RNA
ccaggtctacatgttcctggtgaaatggcaggacctgtcggagaaggtggtctaccggcgcttcaccgagatctacgagtttcatgt

SEQ ID NO: 21807 - RNA, 87 nt, synthetic construct
  source 1..87: mol_type = other RNA
ccaggtatacatgttcctggtgaaatggcaggacctgtcggagaaggtggtctaccggcgcttcaccgagatctacgagttccatgt

SEQ ID NO: 21808 - RNA, 87 nt, synthetic construct
  source 1..87: mol_type = other RNA
ccaggtgtacatgttcctggtgaaatggcaggacctgtcggagaaggtggtctaccggcgcttcaccgagatctacgagttccatgt

SEQ ID NO: 21809 - RNA, 88 nt, synthetic construct
  source 1..88: mol_type = other RNA
cccaggtttacatgttcctggtgaaatggcaggacctgtcggagaaggtggtctaccggcgcttcaccgagatctacgagtttcatgt

SEQ ID NO: 21810 - RNA, 88 nt, synthetic construct
  source 1..88: mol_type = other RNA
cccaggtgtacatgttcctggtgaaatggcaggacctgtcggagaaggtggtctaccggcgcttcaccgagatctacgagtttcatgt

SEQ ID NO: 21811 - RNA, 88 nt, synthetic construct
  source 1..88: mol_type = other RNA
cccaggtttacatgttcctggtgaaatggcaggacctgtcggagaaggtggtctaccggcgcttcaccgagatctacgagttccatgt

SEQ ID NO: 21812 - RNA, 88 nt, synthetic construct
  source 1..88: mol_type = other RNA
cccaggtgtacatgttcctggtgaaatggcaggacctgtcggagaaggtggtctaccggcgcttcaccgagatctacgagttccatgt

SEQ ID NO: 21813 - RNA, 88 nt, synthetic construct
  source 1..88: mol_type = other RNA
cccaggtctacatgttcctggtgaaatggcaggacctgtcggagaaggtggtctaccggcgcttcaccgagatctacgagtttcatgt

SEQ ID NO: 21814 - RNA, 88 nt, synthetic construct
  source 1..88: mol_type = other RNA
cccaggtatacatgttcctggtgaaatggcaggacctgtcggagaaggtggtctaccggcgcttcaccgagatctacgagtttcatgt

SEQ ID NO: 21815 - RNA, 88 nt, synthetic construct
  source 1..88: mol_type = other RNA
cccaggtatacatgttcctggtgaaatggcaggacctgtcggagaaggtggtctaccggcgcttcaccgagatctacgagttccatgt

SEQ ID NO: 21816 - RNA, 88 nt, synthetic construct
  source 1..88: mol_type = other RNA
cccaggtctacatgttcctggtgaaatggcaggacctgtcggagaaggtggtctaccggcgcttcaccgagatctacgagttccatgt

SEQ ID NO: 21817 - RNA, 89 nt, synthetic construct
  source 1..89: mol_type = other RNA
ccccaggtatacatgttcctggtgaaatggcaggacctgtcggagaaggtggtctaccggcgcttcaccgagatctacgagttccatgt

SEQ ID NO: 21818 - RNA, 89 nt, synthetic construct
  source 1..89: mol_type = other RNA
ccccaggtatacatgttcctggtgaaatggcaggacctgtcggagaaggtggtctaccggcgcttcaccgagatctacgagtttcatgt

SEQ ID NO: 21819 - RNA, 89 nt, synthetic construct
  source 1..89: mol_type = other RNA
ccccaggtgtacatgttcctggtgaaatggcaggacctgtcggagaaggtggtctaccggcgcttcaccgagatctacgagtttcatgt

SEQ ID NO: 21820 - RNA, 89 nt, synthetic construct
  source 1..89: mol_type = other RNA
ccccaggtgtacatgttcctggtgaaatggcaggacctgtcggagaaggtggtctaccggcgcttcaccgagatctacgagttccatgt

SEQ ID NO: 21821 - RNA, 89 nt, synthetic construct
  source 1..89: mol_type = other RNA
ccccaggtttacatgttcctggtgaaatggcaggacctgtcggagaaggtggtctaccggcgcttcaccgagatctacgagtttcatgt

SEQ ID NO: 21822 - RNA, 89 nt, synthetic construct
  source 1..89: mol_type = other RNA
ccccaggtctacatgttcctggtgaaatggcaggacctgtcggagaaggtggtctaccggcgcttcaccgagatctacgagttccatgt

SEQ ID NO: 21823 - RNA, 89 nt, synthetic construct
  source 1..89: mol_type = other RNA
ccccaggtttacatgttcctggtgaaatggcaggacctgtcggagaaggtggtctaccggcgcttcaccgagatctacgagttccatgt

SEQ ID NO: 21824 - RNA, 89 nt, synthetic construct
  source 1..89: mol_type = other RNA
ccccaggtctacatgttcctggtgaaatggcaggacctgtcggagaaggtggtctaccggcgcttcaccgagatctacgagtttcatgt

SEQ ID NO: 21825 - RNA, 90 nt, synthetic construct
  source 1..90: mol_type = other RNA
cccccaggtatacatgttcctggtgaaatggcaggacctgtcggagaaggtggtctaccggcgcttcaccgagatctacgagttccatgt

SEQ ID NO: 21826 - RNA, 90 nt, synthetic construct
  source 1..90: mol_type = other RNA
cccccaggtatacatgttcctggtgaaatggcaggacctgtcggagaaggtggtctaccggcgcttcaccgagatctacgagtttcatgt

SEQ ID NO: 21827 - RNA, 90 nt, synthetic construct
  source 1..90: mol_type = other RNA
cccccaggtctacatgttcctggtgaaatggcaggacctgtcggagaaggtggtctaccggcgcttcaccgagatctacgagttccatgt

SEQ ID NO: 21828 - RNA, 90 nt, synthetic construct
  source 1..90: mol_type = other RNA
cccccaggtctacatgttcctggtgaaatggcaggacctgtcggagaaggtggtctaccggcgcttcaccgagatctacgagtttcatgt

SEQ ID NO: 21829 - RNA, 90 nt, synthetic construct
  source 1..90: mol_type = other RNA
cccccaggtgtacatgttcctggtgaaatggcaggacctgtcggagaaggtggtctaccggcgcttcaccgagatctacgagttccatgt

SEQ ID NO: 21830 - RNA, 90 nt, synthetic construct
  source 1..90: mol_type = other RNA
cccccaggtgtacatgttcctggtgaaatggcaggacctgtcggagaaggtggtctaccggcgcttcaccgagatctacgagtttcatgt

SEQ ID NO: 21831 - RNA, 90 nt, synthetic construct
  source 1..90: mol_type = other RNA
cccccaggtttacatgttcctggtgaaatggcaggacctgtcggagaaggtggtctaccggcgcttcaccgagatctacgagttccatgt

SEQ ID NO: 21832 - RNA, 90 nt, synthetic construct
  source 1..90: mol_type = other RNA
cccccaggtttacatgttcctggtgaaatggcaggacctgtcggagaaggtggtctaccggcgcttcaccgagatctacgagtttcatgt

SEQ ID NO: 21833 - RNA, 91 nt, synthetic construct
  source 1..91: mol_type = other RNA
tcccccaggtgtacatgttcctggtgaaatggcaggacctgtcggagaaggtggtctaccggcgcttcaccgagatctacgagtttcatgt

SEQ ID NO: 21834 - RNA, 91 nt, synthetic construct
  source 1..91: mol_type = other RNA
tcccccaggtatacatgttcctggtgaaatggcaggacctgtcggagaaggtggtctaccggcgcttcaccgagatctacgagttccatgt

SEQ ID NO: 21835 - RNA, 91 nt, synthetic construct
  source 1..91: mol_type = other RNA
tcccccaggtatacatgttcctggtgaaatggcaggacctgtcggagaaggtggtctaccggcgcttcaccgagatctacgagtttcatgt

SEQ ID NO: 21836 - RNA, 91 nt, synthetic construct
  source 1..91: mol_type = other RNA
tcccccaggtctacatgttcctggtgaaatggcaggacctgtcggagaaggtggtctaccggcgcttcaccgagatctacgagttccatgt

SEQ ID NO: 21837 - RNA, 91 nt, synthetic construct
  source 1..91: mol_type = other RNA
tcccccaggtctacatgttcctggtgaaatggcaggacctgtcggagaaggtggtctaccggcgcttcaccgagatctacgagtttcatgt

SEQ ID NO: 21838 - RNA, 91 nt, synthetic construct
  source 1..91: mol_type = other RNA
tcccccaggtttacatgttcctggtgaaatggcaggacctgtcggagaaggtggtctaccggcgcttcaccgagatctacgagttccatgt

SEQ ID NO: 21839 - RNA, 91 nt, synthetic construct
  source 1..91: mol_type = other RNA
tcccccaggtttacatgttcctggtgaaatggcaggacctgtcggagaaggtggtctaccggcgcttcaccgagatctacgagtttcatgt

SEQ ID NO: 21840 - RNA, 91 nt, synthetic construct
  source 1..91: mol_type = other RNA
tcccccaggtgtacatgttcctggtgaaatggcaggacctgtcggagaaggtggtctaccggcgcttcaccgagatctacgagttccatgt

SEQ ID NO: 21841 - RNA, 92 nt, synthetic construct
  source 1..92: mol_type = other RNA
ttcccccaggtctacatgttcctggtgaaatggcaggacctgtcggagaaggtggtctaccggcgcttcaccgagatctacgagttccatgt

SEQ ID NO: 21842 - RNA, 92 nt, synthetic construct
  source 1..92: mol_type = other RNA
ttcccccaggtttacatgttcctggtgaaatggcaggacctgtcggagaaggtggtctaccggcgcttcaccgagatctacgagttccatgt

SEQ ID NO: 21843 - RNA, 92 nt, synthetic construct
  source 1..92: mol_type = other RNA
ttcccccaggtatacatgttcctggtgaaatggcaggacctgtcggagaaggtggtctaccggcgcttcaccgagatctacgagttccatgt

SEQ ID NO: 21844 - RNA, 92 nt, synthetic construct
  source 1..92: mol_type = other RNA
ttcccccaggtatacatgttcctggtgaaatggcaggacctgtcggagaaggtggtctaccggcgcttcaccgagatctacgagtttcatgt

SEQ ID NO: 21845 - RNA, 92 nt, synthetic construct
  source 1..92: mol_type = other RNA
ttcccccaggtgtacatgttcctggtgaaatggcaggacctgtcggagaaggtggtctaccggcgcttcaccgagatctacgagtttcatgt

SEQ ID NO: 21846 - RNA, 92 nt, synthetic construct
  source 1..92: mol_type = other RNA
ttcccccaggtttacatgttcctggtgaaatggcaggacctgtcggagaaggtggtctaccggcgcttcaccgagatctacgagtttcatgt

SEQ ID NO: 21847 - RNA, 92 nt, synthetic construct
  source 1..92: mol_type = other RNA
ttcccccaggtgtacatgttcctggtgaaatggcaggacctgtcggagaaggtggtctaccggcgcttcaccgagatctacgagttccatgt

SEQ ID NO: 21848 - RNA, 92 nt, synthetic construct
  source 1..92: mol_type = other RNA
ttcccccaggtctacatgttcctggtgaaatggcaggacctgtcggagaaggtggtctaccggcgcttcaccgagatctacgagtttcatgt

SEQ ID NO: 21849 - RNA, 93 nt, synthetic construct
  source 1..93: mol_type = other RNA
tttcccccaggtttacatgttcctggtgaaatggcaggacctgtcggagaaggtggtctaccggcgcttcaccgagatctacgagtttcatgt

SEQ ID NO: 21850 - RNA, 93 nt, synthetic construct
  source 1..93: mol_type = other RNA
tttcccccaggtctacatgttcctggtgaaatggcaggacctgtcggagaaggtggtctaccggcgcttcaccgagatctacgagtttcatgt

SEQ ID NO: 21851 - RNA, 93 nt, synthetic construct
  source 1..93: mol_type = other RNA
tttcccccaggtgtacatgttcctggtgaaatggcaggacctgtcggagaaggtggtctaccggcgcttcaccgagatctacgagtttcatgt

SEQ ID NO: 21852 - RNA, 93 nt, synthetic construct
  source 1..93: mol_type = other RNA
tttcccccaggtgtacatgttcctggtgaaatggcaggacctgtcggagaaggtggtctaccggcgcttcaccgagatctacgagttccatgt

SEQ ID NO: 21853 - RNA, 93 nt, synthetic construct
  source 1..93: mol_type = other RNA
tttcccccaggtctacatgttcctggtgaaatggcaggacctgtcggagaaggtggtctaccggcgcttcaccgagatctacgagttccatgt

SEQ ID NO: 21854 - RNA, 93 nt, synthetic construct
  source 1..93: mol_type = other RNA
tttcccccaggtatacatgttcctggtgaaatggcaggacctgtcggagaaggtggtctaccggcgcttcaccgagatctacgagtttcatgt

SEQ ID NO: 21855 - RNA, 93 nt, synthetic construct
  source 1..93: mol_type = other RNA
tttcccccaggtatacatgttcctggtgaaatggcaggacctgtcggagaaggtggtctaccggcgcttcaccgagatctacgagttccatgt

SEQ ID NO: 21856 - RNA, 93 nt, synthetic construct
  source 1..93: mol_type = other RNA
tttcccccaggtttacatgttcctggtgaaatggcaggacctgtcggagaaggtggtctaccggcgcttcaccgagatctacgagttccatgt

SEQ ID NO: 21857 - RNA, 94 nt, synthetic construct
  source 1..94: mol_type = other RNA
ctttcccccaggtttacatgttcctggtgaaatggcaggacctgtcggagaaggtggtctaccggcgcttcaccgagatctacgagtttcatgt

SEQ ID NO: 21858 - RNA, 94 nt, synthetic construct
  source 1..94: mol_type = other RNA
ctttcccccaggtctacatgttcctggtgaaatggcaggacctgtcggagaaggtggtctaccggcgcttcaccgagatctacgagttccatgt

SEQ ID NO: 21859 - RNA, 94 nt, synthetic construct
  source 1..94: mol_type = other RNA
ctttcccccaggtctacatgttcctggtgaaatggcaggacctgtcggagaaggtggtctaccggcgcttcaccgagatctacgagtttcatgt

SEQ ID NO: 21860 - RNA, 94 nt, synthetic construct
  source 1..94: mol_type = other RNA
ctttcccccaggtatacatgttcctggtgaaatggcaggacctgtcggagaaggtggtctaccggcgcttcaccgagatctacgagttccatgt

SEQ ID NO: 21861 - RNA, 94 nt, synthetic construct
  source 1..94: mol_type = other RNA
ctttcccccaggtgtacatgttcctggtgaaatggcaggacctgtcggagaaggtggtctaccggcgcttcaccgagatctacgagttccatgt

SEQ ID NO: 21862 - RNA, 94 nt, synthetic construct
  source 1..94: mol_type = other RNA
ctttcccccaggtgtacatgttcctggtgaaatggcaggacctgtcggagaaggtggtctaccggcgcttcaccgagatctacgagtttcatgt

SEQ ID NO: 21863 - RNA, 94 nt, synthetic construct
  source 1..94: mol_type = other RNA
ctttcccccaggtttacatgttcctggtgaaatggcaggacctgtcggagaaggtggtctaccggcgcttcaccgagatctacgagttccatgt

SEQ ID NO: 21864 - RNA, 94 nt, synthetic construct
  source 1..94: mol_type = other RNA
ctttcccccaggtatacatgttcctggtgaaatggcaggacctgtcggagaaggtggtctaccggcgcttcaccgagatctacgagtttcatgt

SEQ ID NO: 21865 - RNA, 95 nt, synthetic construct
  source 1..95: mol_type = other RNA
gctttcccccaggtctacatgttcctggtgaaatggcaggacctgtcggagaaggtggtctaccggcgcttcaccgagatctacgagttccatgt

SEQ ID NO: 21866 - RNA, 95 nt, synthetic construct
  source 1..95: mol_type = other RNA
gctttcccccaggtatacatgttcctggtgaaatggcaggacctgtcggagaaggtggtctaccggcgcttcaccgagatctacgagttccatgt

SEQ ID NO: 21867 - RNA, 95 nt, synthetic construct
  source 1..95: mol_type = other RNA
gctttcccccaggtatacatgttcctggtgaaatggcaggacctgtcggagaaggtggtctaccggcgcttcaccgagatctacgagtttcatgt

SEQ ID NO: 21868 - RNA, 95 nt, synthetic construct
  source 1..95: mol_type = other RNA
gctttcccccaggtctacatgttcctggtgaaatggcaggacctgtcggagaaggtggtctaccggcgcttcaccgagatctacgagtttcatgt

SEQ ID NO: 21869 - RNA, 95 nt, synthetic construct
  source 1..95: mol_type = other RNA
gctttcccccaggtgtacatgttcctggtgaaatggcaggacctgtcggagaaggtggtctaccggcgcttcaccgagatctacgagttccatgt

SEQ ID NO: 21870 - RNA, 95 nt, synthetic construct
  source 1..95: mol_type = other RNA
gctttcccccaggtgtacatgttcctggtgaaatggcaggacctgtcggagaaggtggtctaccggcgcttcaccgagatctacgagtttcatgt

SEQ ID NO: 21871 - RNA, 95 nt, synthetic construct
  source 1..95: mol_type = other RNA
gctttcccccaggtttacatgttcctggtgaaatggcaggacctgtcggagaaggtggtctaccggcgcttcaccgagatctacgagttccatgt

SEQ ID NO: 21872 - RNA, 95 nt, synthetic construct
  source 1..95: mol_type = other RNA
gctttcccccaggtttacatgttcctggtgaaatggcaggacctgtcggagaaggtggtctaccggcgcttcaccgagatctacgagtttcatgt

SEQ ID NO: 21873 - RNA, 96 nt, synthetic construct
  source 1..96: mol_type = other RNA
ggctttcccccaggtgtacatgttcctggtgaaatggcaggacctgtcggagaaggtggtctaccggcgcttcaccgagatctacgagttccatgt

SEQ ID NO: 21874 - RNA, 96 nt, synthetic construct
  source 1..96: mol_type = other RNA
ggctttcccccaggtatacatgttcctggtgaaatggcaggacctgtcggagaaggtggtctaccggcgcttcaccgagatctacgagttccatgt

SEQ ID NO: 21875 - RNA, 96 nt, synthetic construct
  source 1..96: mol_type = other RNA
ggctttcccccaggtctacatgttcctggtgaaatggcaggacctgtcggagaaggtggtctaccggcgcttcaccgagatctacgagttccatgt

SEQ ID NO: 21876 - RNA, 96 nt, synthetic construct
  source 1..96: mol_type = other RNA
ggctttcccccaggtatacatgttcctggtgaaatggcaggacctgtcggagaaggtggtctaccggcgcttcaccgagatctacgagtttcatgt

SEQ ID NO: 21877 - RNA, 96 nt, synthetic construct
  source 1..96: mol_type = other RNA
ggctttcccccaggtctacatgttcctggtgaaatggcaggacctgtcggagaaggtggtctaccggcgcttcaccgagatctacgagtttcatgt

SEQ ID NO: 21878 - RNA, 96 nt, synthetic construct
  source 1..96: mol_type = other RNA
ggctttcccccaggtgtacatgttcctggtgaaatggcaggacctgtcggagaaggtggtctaccggcgcttcaccgagatctacgagtttcatgt

SEQ ID NO: 21879 - RNA, 96 nt, synthetic construct
  source 1..96: mol_type = other RNA
ggctttcccccaggtttacatgttcctggtgaaatggcaggacctgtcggagaaggtggtctaccggcgcttcaccgagatctacgagttccatgt

SEQ ID NO: 21880 - RNA, 96 nt, synthetic construct
  source 1..96: mol_type = other RNA
ggctttcccccaggtttacatgttcctggtgaaatggcaggacctgtcggagaaggtggtctaccggcgcttcaccgagatctacgagtttcatgt

SEQ ID NO: 21881 - RNA, 97 nt, synthetic construct
  source 1..97: mol_type = other RNA
tggctttcccccaggtttacatgttcctggtgaaatggcaggacctgtcggagaaggtggtctaccggcgcttcaccgagatctacgagtttcatgt

SEQ ID NO: 21882 - RNA, 97 nt, synthetic construct
  source 1..97: mol_type = other RNA
tggctttcccccaggtatacatgttcctggtgaaatggcaggacctgtcggagaaggtggtctaccggcgcttcaccgagatctacgagttccatgt

SEQ ID NO: 21883 - RNA, 97 nt, synthetic construct
  source 1..97: mol_type = other RNA
tggctttcccccaggtctacatgttcctggtgaaatggcaggacctgtcggagaaggtggtctaccggcgcttcaccgagatctacgagttccatgt

SEQ ID NO: 21884 - RNA, 97 nt, synthetic construct
  source 1..97: mol_type = other RNA
tggctttcccccaggtatacatgttcctggtgaaatggcaggacctgtcggagaaggtggtctaccggcgcttcaccgagatctacgagtttcatgt

SEQ ID NO: 21885 - RNA, 97 nt, synthetic construct
  source 1..97: mol_type = other RNA
tggctttcccccaggtgtacatgttcctggtgaaatggcaggacctgtcggagaaggtggtctaccggcgcttcaccgagatctacgagttccatgt

SEQ ID NO: 21886 - RNA, 97 nt, synthetic construct
  source 1..97: mol_type = other RNA
tggctttcccccaggtgtacatgttcctggtgaaatggcaggacctgtcggagaaggtggtctaccggcgcttcaccgagatctacgagtttcatgt

SEQ ID NO: 21887 - RNA, 97 nt, synthetic construct
  source 1..97: mol_type = other RNA
tggctttcccccaggtttacatgttcctggtgaaatggcaggacctgtcggagaaggtggtctaccggcgcttcaccgagatctacgagttccatgt

SEQ ID NO: 21888 - RNA, 97 nt, synthetic construct
  source 1..97: mol_type = other RNA
tggctttcccccaggtctacatgttcctggtgaaatggcaggacctgtcggagaaggtggtctaccggcgcttcaccgagatctacgagtttcatgt

SEQ ID NO: 21889 - RNA, 98 nt, synthetic construct
  source 1..98: mol_type = other RNA
ctggctttcccccaggtgtacatgttcctggtgaaatggcaggacctgtcggagaaggtggtctaccggcgcttcaccgagatctacgagtttcatgt

SEQ ID NO: 21890 - RNA, 98 nt, synthetic construct
  source 1..98: mol_type = other RNA
ctggctttcccccaggtttacatgttcctggtgaaatggcaggacctgtcggagaaggtggtctaccggcgcttcaccgagatctacgagtttcatgt

SEQ ID NO: 21891 - RNA, 98 nt, synthetic construct
  source 1..98: mol_type = other RNA
ctggctttcccccaggtttacatgttcctggtgaaatggcaggacctgtcggagaaggtggtctaccggcgcttcaccgagatctacgagttccatgt

SEQ ID NO: 21892 - RNA, 98 nt, synthetic construct
  source 1..98: mol_type = other RNA
ctggctttcccccaggtgtacatgttcctggtgaaatggcaggacctgtcggagaaggtggtctaccggcgcttcaccgagatctacgagttccatgt

SEQ ID NO: 21893 - RNA, 98 nt, synthetic construct
  source 1..98: mol_type = other RNA
ctggctttcccccaggtatacatgttcctggtgaaatggcaggacctgtcggagaaggtggtctaccggcgcttcaccgagatctacgagtttcatgt

SEQ ID NO: 21894 - RNA, 98 nt, synthetic construct
  source 1..98: mol_type = other RNA
ctggctttcccccaggtctacatgttcctggtgaaatggcaggacctgtcggagaaggtggtctaccggcgcttcaccgagatctacgagttccatgt

SEQ ID NO: 21895 - RNA, 98 nt, synthetic construct
  source 1..98: mol_type = other RNA
ctggctttcccccaggtatacatgttcctggtgaaatggcaggacctgtcggagaaggtggtctaccggcgcttcaccgagatctacgagttccatgt

SEQ ID NO: 21896 - RNA, 98 nt, synthetic construct
  source 1..98: mol_type = other RNA
ctggctttcccccaggtctacatgttcctggtgaaatggcaggacctgtcggagaaggtggtctaccggcgcttcaccgagatctacgagtttcatgt

SEQ ID NO: 21897 - RNA, 99 nt, synthetic construct
  source 1..99: mol_type = other RNA
tctggctttcccccaggtgtacatgttcctggtgaaatggcaggacctgtcggagaaggtggtctaccggcgcttcaccgagatctacgagtttcatgt

SEQ ID NO: 21898 - RNA, 99 nt, synthetic construct
  source 1..99: mol_type = other RNA
tctggctttcccccaggtttacatgttcctggtgaaatggcaggacctgtcggagaaggtggtctaccggcgcttcaccgagatctacgagtttcatgt

SEQ ID NO: 21899 - RNA, 99 nt, synthetic construct
  source 1..99: mol_type = other RNA
tctggctttcccccaggtctacatgttcctggtgaaatggcaggacctgtcggagaaggtggtctaccggcgcttcaccgagatctacgagtttcatgt

SEQ ID NO: 21900 - RNA, 99 nt, synthetic construct
  source 1..99: mol_type = other RNA
tctggctttcccccaggtgtacatgttcctggtgaaatggcaggacctgtcggagaaggtggtctaccggcgcttcaccgagatctacgagttccatgt

SEQ ID NO: 21901 - RNA, 99 nt, synthetic construct
  source 1..99: mol_type = other RNA
tctggctttcccccaggtctacatgttcctggtgaaatggcaggacctgtcggagaaggtggtctaccggcgcttcaccgagatctacgagttccatgt

SEQ ID NO: 21902 - RNA, 99 nt, synthetic construct
  source 1..99: mol_type = other RNA
tctggctttcccccaggtttacatgttcctggtgaaatggcaggacctgtcggagaaggtggtctaccggcgcttcaccgagatctacgagttccatgt

SEQ ID NO: 21903 - RNA, 99 nt, synthetic construct
  source 1..99: mol_type = other RNA
tctggctttcccccaggtatacatgttcctggtgaaatggcaggacctgtcggagaaggtggtctaccggcgcttcaccgagatctacgagttccatgt

SEQ ID NO: 21904 - RNA, 99 nt, synthetic construct
  source 1..99: mol_type = other RNA
tctggctttcccccaggtatacatgttcctggtgaaatggcaggacctgtcggagaaggtggtctaccggcgcttcaccgagatctacgagtttcatgt

SEQ ID NO: 21905 - RNA, 100 nt, synthetic construct
  source 1..100: mol_type = other RNA
ctctggctttcccccaggtctacatgttcctggtgaaatggcaggacctgtcggagaaggtggtctaccggcgcttcaccgagatctacgagtttcatgt

SEQ ID NO: 21906 - RNA, 100 nt, synthetic construct
  source 1..100: mol_type = other RNA
ctctggctttcccccaggtgtacatgttcctggtgaaatggcaggacctgtcggagaaggtggtctaccggcgcttcaccgagatctacgagtttcatgt

SEQ ID NO: 21907 - RNA, 100 nt, synthetic construct
  source 1..100: mol_type = other RNA
ctctggctttcccccaggtttacatgttcctggtgaaatggcaggacctgtcggagaaggtggtctaccggcgcttcaccgagatctacgagttccatgt

SEQ ID NO: 21908 - RNA, 100 nt, synthetic construct
  source 1..100: mol_type = other RNA
ctctggctttcccccaggtttacatgttcctggtgaaatggcaggacctgtcggagaaggtggtctaccggcgcttcaccgagatctacgagtttcatgt

SEQ ID NO: 21909 - RNA, 100 nt, synthetic construct
  source 1..100: mol_type = other RNA
ctctggctttcccccaggtgtacatgttcctggtgaaatggcaggacctgtcggagaaggtggtctaccggcgcttcaccgagatctacgagttccatgt

SEQ ID NO: 21910 - RNA, 100 nt, synthetic construct
  source 1..100: mol_type = other RNA
ctctggctttcccccaggtctacatgttcctggtgaaatggcaggacctgtcggagaaggtggtctaccggcgcttcaccgagatctacgagttccatgt

SEQ ID NO: 21911 - RNA, 100 nt, synthetic construct
  source 1..100: mol_type = other RNA
ctctggctttcccccaggtatacatgttcctggtgaaatggcaggacctgtcggagaaggtggtctaccggcgcttcaccgagatctacgagtttcatgt

SEQ ID NO: 21912 - RNA, 100 nt, synthetic construct
  source 1..100: mol_type = other RNA
ctctggctttcccccaggtatacatgttcctggtgaaatggcaggacctgtcggagaaggtggtctaccggcgcttcaccgagatctacgagttccatgt

SEQ ID NO: 21913 - RNA, 101 nt, synthetic construct
  source 1..101: mol_type = other RNA
actctggctttcccccaggtctacatgttcctggtgaaatggcaggacctgtcggagaaggtggtctaccggcgcttcaccgagatctacgagtttcatgt

SEQ ID NO: 21914 - RNA, 101 nt, synthetic construct
  source 1..101: mol_type = other RNA
actctggctttcccccaggtatacatgttcctggtgaaatggcaggacctgtcggagaaggtggtctaccggcgcttcaccgagatctacgagttccatgt

SEQ ID NO: 21915 - RNA, 101 nt, synthetic construct
  source 1..101: mol_type = other RNA
actctggctttcccccaggtctacatgttcctggtgaaatggcaggacctgtcggagaaggtggtctaccggcgcttcaccgagatctacgagttccatgt

SEQ ID NO: 21916 - RNA, 101 nt, synthetic construct
  source 1..101: mol_type = other RNA
actctggctttcccccaggtatacatgttcctggtgaaatggcaggacctgtcggagaaggtggtctaccggcgcttcaccgagatctacgagtttcatgt

SEQ ID NO: 21917 - RNA, 101 nt, synthetic construct
  source 1..101: mol_type = other RNA
actctggctttcccccaggtgtacatgttcctggtgaaatggcaggacctgtcggagaaggtggtctaccggcgcttcaccgagatctacgagtttcatgt

SEQ ID NO: 21918 - RNA, 101 nt, synthetic construct
  source 1..101: mol_type = other RNA
actctggctttcccccaggtttacatgttcctggtgaaatggcaggacctgtcggagaaggtggtctaccggcgcttcaccgagatctacgagttccatgt

SEQ ID NO: 21919 - RNA, 101 nt, synthetic construct
  source 1..101: mol_type = other RNA
actctggctttcccccaggtttacatgttcctggtgaaatggcaggacctgtcggagaaggtggtctaccggcgcttcaccgagatctacgagtttcatgt

SEQ ID NO: 21920 - RNA, 101 nt, synthetic construct
  source 1..101: mol_type = other RNA
actctggctttcccccaggtgtacatgttcctggtgaaatggcaggacctgtcggagaaggtggtctaccggcgcttcaccgagatctacgagttccatgt

SEQ ID NO: 21921 - RNA, 102 nt, synthetic construct
  source 1..102: mol_type = other RNA
gactctggctttcccccaggtgtacatgttcctggtgaaatggcaggacctgtcggagaaggtggtctaccggcgcttcaccgagatctacgagtttcatgt

SEQ ID NO: 21922 - RNA, 102 nt, synthetic construct
  source 1..102: mol_type = other RNA
gactctggctttcccccaggtttacatgttcctggtgaaatggcaggacctgtcggagaaggtggtctaccggcgcttcaccgagatctacgagtttcatgt

SEQ ID NO: 21923 - RNA, 102 nt, synthetic construct
  source 1..102: mol_type = other RNA
gactctggctttcccccaggtttacatgttcctggtgaaatggcaggacctgtcggagaaggtggtctaccggcgcttcaccgagatctacgagttccatgt

SEQ ID NO: 21924 - RNA, 102 nt, synthetic construct
  source 1..102: mol_type = other RNA
gactctggctttcccccaggtgtacatgttcctggtgaaatggcaggacctgtcggagaaggtggtctaccggcgcttcaccgagatctacgagttccatgt

SEQ ID NO: 21925 - RNA, 102 nt, synthetic construct
  source 1..102: mol_type = other RNA
gactctggctttcccccaggtatacatgttcctggtgaaatggcaggacctgtcggagaaggtggtctaccggcgcttcaccgagatctacgagttccatgt

SEQ ID NO: 21926 - RNA, 102 nt, synthetic construct
  source 1..102: mol_type = other RNA
gactctggctttcccccaggtctacatgttcctggtgaaatggcaggacctgtcggagaaggtggtctaccggcgcttcaccgagatctacgagttccatgt

SEQ ID NO: 21927 - RNA, 102 nt, synthetic construct
  source 1..102: mol_type = other RNA
gactctggctttcccccaggtatacatgttcctggtgaaatggcaggacctgtcggagaaggtggtctaccggcgcttcaccgagatctacgagtttcatgt

SEQ ID NO: 21928 - RNA, 102 nt, synthetic construct
  source 1..102: mol_type = other RNA
gactctggctttcccccaggtctacatgttcctggtgaaatggcaggacctgtcggagaaggtggtctaccggcgcttcaccgagatctacgagtttcatgt

SEQ ID NO: 21929 - RNA, 103 nt, synthetic construct
  source 1..103: mol_type = other RNA
cgactctggctttcccccaggtctacatgttcctggtgaaatggcaggacctgtcggagaaggtggtctaccggcgcttcaccgagatctacgagtttcatgt

SEQ ID NO: 21930 - RNA, 103 nt, synthetic construct
  source 1..103: mol_type = other RNA
cgactctggctttcccccaggtgtacatgttcctggtgaaatggcaggacctgtcggagaaggtggtctaccggcgcttcaccgagatctacgagttccatgt

SEQ ID NO: 21931 - RNA, 103 nt, synthetic construct
  source 1..103: mol_type = other RNA
cgactctggctttcccccaggtctacatgttcctggtgaaatggcaggacctgtcggagaaggtggtctaccggcgcttcaccgagatctacgagttccatgt

SEQ ID NO: 21932 - RNA, 103 nt, synthetic construct
  source 1..103: mol_type = other RNA
cgactctggctttcccccaggtttacatgttcctggtgaaatggcaggacctgtcggagaaggtggtctaccggcgcttcaccgagatctacgagttccatgt

SEQ ID NO: 21933 - RNA, 103 nt, synthetic construct
  source 1..103: mol_type = other RNA
cgactctggctttcccccaggtatacatgttcctggtgaaatggcaggacctgtcggagaaggtggtctaccggcgcttcaccgagatctacgagttccatgt

SEQ ID NO: 21934 - RNA, 103 nt, synthetic construct
  source 1..103: mol_type = other RNA
cgactctggctttcccccaggtttacatgttcctggtgaaatggcaggacctgtcggagaaggtggtctaccggcgcttcaccgagatctacgagtttcatgt

SEQ ID NO: 21935 - RNA, 103 nt, synthetic construct
  source 1..103: mol_type = other RNA
cgactctggctttcccccaggtgtacatgttcctggtgaaatggcaggacctgtcggagaaggtggtctaccggcgcttcaccgagatctacgagtttcatgt

SEQ ID NO: 21936 - RNA, 103 nt, synthetic construct
  source 1..103: mol_type = other RNA
cgactctggctttcccccaggtatacatgttcctggtgaaatggcaggacctgtcggagaaggtggtctaccggcgcttcaccgagatctacgagtttcatgt

SEQ ID NO: 21937 - RNA, 19 nt, synthetic construct
  source 1..19: mol_type = other RNA
agatctacgagttccatgt

SEQ ID NO: 21938 - RNA, 19 nt, synthetic construct
  source 1..19: mol_type = other RNA
gagatctacgagttccatg

SEQ ID NO: 21939 - RNA, 20 nt, synthetic construct
  source 1..20: mol_type = other RNA
atctacgagttccatgtgag

SEQ ID NO: 21940 - RNA, 20 nt, synthetic construct
  source 1..20: mol_type = other RNA
cgagatctacgagttccatg

SEQ ID NO: 21941 - RNA, 20 nt, synthetic construct
  source 1..20: mol_type = other RNA
gcgcttcaccgagatctacg

SEQ ID NO: 21942 - RNA, 20 nt, synthetic construct
  source 1..20: mol_type = other RNA
cggcgcttcaccgagatcta

SEQ ID NO: 21943 - RNA, 20 nt, synthetic construct
  source 1..20: mol_type = other RNA
agatctacgagttccatgtg

SEQ ID NO: 21944 - RNA, 20 nt, synthetic construct
  source 1..20: mol_type = other RNA
accgagatctacgagttcca

SEQ ID NO: 21945 - RNA, 16 nt, synthetic construct
  source 1..16: mol_type = other RNA
cacagcaaagcctctt

SEQ ID NO: 21946 - RNA, 17 nt, synthetic construct
  source 1..17: mol_type = other RNA
acacagcaaagcctctt

SEQ ID NO: 21947 - RNA, 18 nt, synthetic construct
  source 1..18: mol_type = other RNA
cacacagcaaagcctctt

SEQ ID NO: 21948 - RNA, 19 nt, synthetic construct
  source 1..19: mol_type = other RNA
gcacacagcaaagcctctt

SEQ ID NO: 21949 - RNA, 20 nt, synthetic construct
  source 1..20: mol_type = other RNA
tgcacacagcaaagcctctt

SEQ ID NO: 21950 - RNA, 21 nt, synthetic construct
  source 1..21: mol_type = other RNA
gtgcacacagcaaagcctctt

SEQ ID NO: 21951 - RNA, 22 nt, synthetic construct
  source 1..22: mol_type = other RNA
ggtgcacacagcaaagcctctt

SEQ ID NO: 21952-21957 - skipped (6 entries)

SEQ ID NO: 21958 - RNA, 10 nt, synthetic construct
  source 1..10: mol_type = other RNA
aggctttgct

SEQ ID NO: 21959 - RNA, 11 nt, synthetic construct
  source 1..11: mol_type = other RNA
aggctttgctg

SEQ ID NO: 21960 - RNA, 12 nt, synthetic construct
  source 1..12: mol_type = other RNA
aggctttgctgt

SEQ ID NO: 21961 - RNA, 13 nt, synthetic construct
  source 1..13: mol_type = other RNA
aggctttgctgtg

SEQ ID NO: 21962 - RNA, 14 nt, synthetic construct
  source 1..14: mol_type = other RNA
aggctttgctgtgt

SEQ ID NO: 21963 - RNA, 15 nt, synthetic construct
  source 1..15: mol_type = other RNA
aggctttgctgtgtg

SEQ ID NO: 21964 - RNA, 16 nt, synthetic construct
  source 1..16: mol_type = other RNA
aggctttgctgtgtgc

SEQ ID NO: 21965 - RNA, 17 nt, synthetic construct
  source 1..17: mol_type = other RNA
aggctttgctgtgtgca

SEQ ID NO: 21966 - RNA, 18 nt, synthetic construct
  source 1..18: mol_type = other RNA
aggctttgctgtgtgcac

SEQ ID NO: 21967 - RNA, 19 nt, synthetic construct
  source 1..19: mol_type = other RNA
aggctttgctgtgtgcacc

SEQ ID NO: 21968 - RNA, 46 nt, synthetic construct
  source 1..46: mol_type = other RNA
acctgggggaaagccagagtcgggggaccccattcagcctccaaag

SEQ ID NO: 21969 - RNA, 47 nt, synthetic construct
  source 1..47: mol_type = other RNA
aacctgggggaaagccagagtcgggggaccccattcagcctccaaag

SEQ ID NO: 21970 - RNA, 47 nt, synthetic construct
  source 1..47: mol_type = other RNA
cacctgggggaaagccagagtcgggggaccccattcagcctccaaag

SEQ ID NO: 21971 - RNA, 47 nt, synthetic construct
  source 1..47: mol_type = other RNA
gacctgggggaaagccagagtcgggggaccccattcagcctccaaag

SEQ ID NO: 21972 - RNA, 47 nt, synthetic construct
  source 1..47: mol_type = other RNA
tacctgggggaaagccagagtcgggggaccccattcagcctccaaag

SEQ ID NO: 21973 - RNA, 48 nt, synthetic construct
  source 1..48: mol_type = other RNA
aaacctgggggaaagccagagtcgggggaccccattcagcctccaaag

SEQ ID NO: 21974 - RNA, 48 nt, synthetic construct
  source 1..48: mol_type = other RNA
acacctgggggaaagccagagtcgggggaccccattcagcctccaaag

SEQ ID NO: 21975 - RNA, 48 nt, synthetic construct
  source 1..48: mol_type = other RNA
agacctgggggaaagccagagtcgggggaccccattcagcctccaaag

SEQ ID NO: 21976 - RNA, 48 nt, synthetic construct
  source 1..48: mol_type = other RNA
atacctgggggaaagccagagtcgggggaccccattcagcctccaaag

SEQ ID NO: 21977 - RNA, 49 nt, synthetic construct
  source 1..49: mol_type = other RNA
tatacctgggggaaagccagagtcgggggaccccattcagcctccaaag

SEQ ID NO: 21978 - RNA, 49 nt, synthetic construct
  source 1..49: mol_type = other RNA
tagacctgggggaaagccagagtcgggggaccccattcagcctccaaag

SEQ ID NO: 21979 - RNA, 49 nt, synthetic construct
  source 1..49: mol_type = other RNA
tacacctgggggaaagccagagtcgggggaccccattcagcctccaaag

SEQ ID NO: 21980 - RNA, 49 nt, synthetic construct
  source 1..49: mol_type = other RNA
taaacctgggggaaagccagagtcgggggaccccattcagcctccaaag

SEQ ID NO: 21981 - RNA, 50 nt, synthetic construct
  source 1..50: mol_type = other RNA
gtacacctgggggaaagccagagtcgggggaccccattcagcctccaaag

SEQ ID NO: 21982 - RNA, 50 nt, synthetic construct
  source 1..50: mol_type = other RNA
gtaaacctgggggaaagccagagtcgggggaccccattcagcctccaaag

SEQ ID NO: 21983 - RNA, 50 nt, synthetic construct
  source 1..50: mol_type = other RNA
gtagacctgggggaaagccagagtcgggggaccccattcagcctccaaag

SEQ ID NO: 21984 - RNA, 50 nt, synthetic construct
  source 1..50: mol_type = other RNA
gtatacctgggggaaagccagagtcgggggaccccattcagcctccaaag

SEQ ID NO: 21985 - RNA, 51 nt, synthetic construct
  source 1..51: mol_type = other RNA
tgtacacctgggggaaagccagagtcgggggaccccattcagcctccaaag

SEQ ID NO: 21986 - RNA, 51 nt, synthetic construct
  source 1..51: mol_type = other RNA
tgtagacctgggggaaagccagagtcgggggaccccattcagcctccaaag

SEQ ID NO: 21987 - RNA, 51 nt, synthetic construct
  source 1..51: mol_type = other RNA
tgtatacctgggggaaagccagagtcgggggaccccattcagcctccaaag

SEQ ID NO: 21988 - RNA, 51 nt, synthetic construct
  source 1..51: mol_type = other RNA
tgtaaacctgggggaaagccagagtcgggggaccccattcagcctccaaag

SEQ ID NO: 21989 - RNA, 52 nt, synthetic construct
  source 1..52: mol_type = other RNA
atgtatacctgggggaaagccagagtcgggggaccccattcagcctccaaag

SEQ ID NO: 21990 - RNA, 52 nt, synthetic construct
  source 1..52: mol_type = other RNA
atgtacacctgggggaaagccagagtcgggggaccccattcagcctccaaag

SEQ ID NO: 21991 - RNA, 52 nt, synthetic construct
  source 1..52: mol_type = other RNA
atgtagacctgggggaaagccagagtcgggggaccccattcagcctccaaag

SEQ ID NO: 21992 - RNA, 52 nt, synthetic construct
  source 1..52: mol_type = other RNA
atgtaaacctgggggaaagccagagtcgggggaccccattcagcctccaaag

SEQ ID NO: 21993 - RNA, 53 nt, synthetic construct
  source 1..53: mol_type = other RNA
catgtagacctgggggaaagccagagtcgggggaccccattcagcctccaaag

SEQ ID NO: 21994 - RNA, 53 nt, synthetic construct
  source 1..53: mol_type = other RNA
catgtaaacctgggggaaagccagagtcgggggaccccattcagcctccaaag

SEQ ID NO: 21995 - RNA, 53 nt, synthetic construct
  source 1..53: mol_type = other RNA
catgtacacctgggggaaagccagagtcgggggaccccattcagcctccaaag

SEQ ID NO: 21996 - RNA, 53 nt, synthetic construct
  source 1..53: mol_type = other RNA
catgtatacctgggggaaagccagagtcgggggaccccattcagcctccaaag

SEQ ID NO: 21997 - RNA, 54 nt, synthetic construct
  source 1..54: mol_type = other RNA
acatgtagacctgggggaaagccagagtcgggggaccccattcagcctccaaag

SEQ ID NO: 21998 - RNA, 54 nt, synthetic construct
  source 1..54: mol_type = other RNA
acatgtaaacctgggggaaagccagagtcgggggaccccattcagcctccaaag

SEQ ID NO: 21999 - RNA, 54 nt, synthetic construct
  source 1..54: mol_type = other RNA
acatgtatacctgggggaaagccagagtcgggggaccccattcagcctccaaag

SEQ ID NO: 22000 - RNA, 54 nt, synthetic construct
  source 1..54: mol_type = other RNA
acatgtacacctgggggaaagccagagtcgggggaccccattcagcctccaaag

SEQ ID NO: 22001 - RNA, 55 nt, synthetic construct
  source 1..55: mol_type = other RNA
aacatgtatacctgggggaaagccagagtcgggggaccccattcagcctccaaag

SEQ ID NO: 22002 - RNA, 55 nt, synthetic construct
  source 1..55: mol_type = other RNA
aacatgtagacctgggggaaagccagagtcgggggaccccattcagcctccaaag

SEQ ID NO: 22003 - RNA, 55 nt, synthetic construct
  source 1..55: mol_type = other RNA
aacatgtacacctgggggaaagccagagtcgggggaccccattcagcctccaaag

SEQ ID NO: 22004 - RNA, 55 nt, synthetic construct
  source 1..55: mol_type = other RNA
aacatgtaaacctgggggaaagccagagtcgggggaccccattcagcctccaaag

SEQ ID NO: 22005 - RNA, 56 nt, synthetic construct
  source 1..56: mol_type = other RNA
gaacatgtacacctgggggaaagccagagtcgggggaccccattcagcctccaaag

SEQ ID NO: 22006 - RNA, 56 nt, synthetic construct
  source 1..56: mol_type = other RNA
gaacatgtatacctgggggaaagccagagtcgggggaccccattcagcctccaaag

SEQ ID NO: 22007 - RNA, 56 nt, synthetic construct
  source 1..56: mol_type = other RNA
gaacatgtagacctgggggaaagccagagtcgggggaccccattcagcctccaaag

SEQ ID NO: 22008 - RNA, 56 nt, synthetic construct
  source 1..56: mol_type = other RNA
gaacatgtaaacctgggggaaagccagagtcgggggaccccattcagcctccaaag

SEQ ID NO: 22009 - RNA, 57 nt, synthetic construct
  source 1..57: mol_type = other RNA
ggaacatgtacacctgggggaaagccagagtcgggggaccccattcagcctccaaag

SEQ ID NO: 22010 - RNA, 57 nt, synthetic construct
  source 1..57: mol_type = other RNA
ggaacatgtaaacctgggggaaagccagagtcgggggaccccattcagcctccaaag

SEQ ID NO: 22011 - RNA, 57 nt, synthetic construct
  source 1..57: mol_type = other RNA
ggaacatgtagacctgggggaaagccagagtcgggggaccccattcagcctccaaag

SEQ ID NO: 22012 - RNA, 57 nt, synthetic construct
  source 1..57: mol_type = other RNA
ggaacatgtatacctgggggaaagccagagtcgggggaccccattcagcctccaaag

SEQ ID NO: 22013 - RNA, 58 nt, synthetic construct
  source 1..58: mol_type = other RNA
aggaacatgtacacctgggggaaagccagagtcgggggaccccattcagcctccaaag

SEQ ID NO: 22014 - RNA, 58 nt, synthetic construct
  source 1..58: mol_type = other RNA
aggaacatgtatacctgggggaaagccagagtcgggggaccccattcagcctccaaag

SEQ ID NO: 22015 - RNA, 58 nt, synthetic construct
  source 1..58: mol_type = other RNA
aggaacatgtaaacctgggggaaagccagagtcgggggaccccattcagcctccaaag

SEQ ID NO: 22016 - RNA, 58 nt, synthetic construct
  source 1..58: mol_type = other RNA
aggaacatgtagacctgggggaaagccagagtcgggggaccccattcagcctccaaag

SEQ ID NO: 22017 - RNA, 59 nt, synthetic construct
  source 1..59: mol_type = other RNA
caggaacatgtagacctgggggaaagccagagtcgggggaccccattcagcctccaaag

SEQ ID NO: 22018 - RNA, 59 nt, synthetic construct
  source 1..59: mol_type = other RNA
caggaacatgtatacctgggggaaagccagagtcgggggaccccattcagcctccaaag

SEQ ID NO: 22019 - RNA, 59 nt, synthetic construct
  source 1..59: mol_type = other RNA
caggaacatgtacacctgggggaaagccagagtcgggggaccccattcagcctccaaag

SEQ ID NO: 22020 - RNA, 59 nt, synthetic construct
  source 1..59: mol_type = other RNA
caggaacatgtaaacctgggggaaagccagagtcgggggaccccattcagcctccaaag

SEQ ID NO: 22021 - RNA, 60 nt, synthetic construct
  source 1..60: mol_type = other RNA
ccaggaacatgtatacctgggggaaagccagagtcgggggaccccattcagcctccaaag

SEQ ID NO: 22022 - RNA, 60 nt, synthetic construct
  source 1..60: mol_type = other RNA
ccaggaacatgtacacctgggggaaagccagagtcgggggaccccattcagcctccaaag

SEQ ID NO: 22023 - RNA, 60 nt, synthetic construct
  source 1..60: mol_type = other RNA
ccaggaacatgtagacctgggggaaagccagagtcgggggaccccattcagcctccaaag

SEQ ID NO: 22024 - RNA, 60 nt, synthetic construct
  source 1..60: mol_type = other RNA
ccaggaacatgtaaacctgggggaaagccagagtcgggggaccccattcagcctccaaag

SEQ ID NO: 22025 - RNA, 61 nt, synthetic construct
  source 1..61: mol_type = other RNA
accaggaacatgtagacctgggggaaagccagagtcgggggaccccattcagcctccaaag

SEQ ID NO: 22026 - RNA, 61 nt, synthetic construct
  source 1..61: mol_type = other RNA
accaggaacatgtacacctgggggaaagccagagtcgggggaccccattcagcctccaaag

SEQ ID NO: 22027 - RNA, 61 nt, synthetic construct
  source 1..61: mol_type = other RNA
accaggaacatgtatacctgggggaaagccagagtcgggggaccccattcagcctccaaag

SEQ ID NO: 22028 - RNA, 61 nt, synthetic construct
  source 1..61: mol_type = other RNA
accaggaacatgtaaacctgggggaaagccagagtcgggggaccccattcagcctccaaag

SEQ ID NO: 22029 - RNA, 62 nt, synthetic construct
  source 1..62: mol_type = other RNA
caccaggaacatgtaaacctgggggaaagccagagtcgggggaccccattcagcctccaaag

SEQ ID NO: 22030 - RNA, 62 nt, synthetic construct
  source 1..62: mol_type = other RNA
caccaggaacatgtagacctgggggaaagccagagtcgggggaccccattcagcctccaaag

SEQ ID NO: 22031 - RNA, 62 nt, synthetic construct
  source 1..62: mol_type = other RNA
caccaggaacatgtatacctgggggaaagccagagtcgggggaccccattcagcctccaaag

SEQ ID NO: 22032 - RNA, 62 nt, synthetic construct
  source 1..62: mol_type = other RNA
caccaggaacatgtacacctgggggaaagccagagtcgggggaccccattcagcctccaaag

SEQ ID NO: 22033 - RNA, 63 nt, synthetic construct
  source 1..63: mol_type = other RNA
tcaccaggaacatgtaaacctgggggaaagccagagtcgggggaccccattcagcctccaaag

SEQ ID NO: 22034 - RNA, 63 nt, synthetic construct
  source 1..63: mol_type = other RNA
tcaccaggaacatgtatacctgggggaaagccagagtcgggggaccccattcagcctccaaag

SEQ ID NO: 22035 - RNA, 63 nt, synthetic construct
  source 1..63: mol_type = other RNA
tcaccaggaacatgtagacctgggggaaagccagagtcgggggaccccattcagcctccaaag

SEQ ID NO: 22036 - RNA, 63 nt, synthetic construct
  source 1..63: mol_type = other RNA
tcaccaggaacatgtacacctgggggaaagccagagtcgggggaccccattcagcctccaaag

SEQ ID NO: 22037 - RNA, 64 nt, synthetic construct
  source 1..64: mol_type = other RNA
ttcaccaggaacatgtatacctgggggaaagccagagtcgggggaccccattcagcctccaaag

SEQ ID NO: 22038 - RNA, 64 nt, synthetic construct
  source 1..64: mol_type = other RNA
ttcaccaggaacatgtaaacctgggggaaagccagagtcgggggaccccattcagcctccaaag

SEQ ID NO: 22039 - RNA, 64 nt, synthetic construct
  source 1..64: mol_type = other RNA
ttcaccaggaacatgtacacctgggggaaagccagagtcgggggaccccattcagcctccaaag

SEQ ID NO: 22040 - RNA, 64 nt, synthetic construct
  source 1..64: mol_type = other RNA
ttcaccaggaacatgtagacctgggggaaagccagagtcgggggaccccattcagcctccaaag

SEQ ID NO: 22041 - RNA, 65 nt, synthetic construct
  source 1..65: mol_type = other RNA
tttcaccaggaacatgtaaacctgggggaaagccagagtcgggggaccccattcagcctccaaag

SEQ ID NO: 22042 - RNA, 65 nt, synthetic construct
  source 1..65: mol_type = other RNA
tttcaccaggaacatgtacacctgggggaaagccagagtcgggggaccccattcagcctccaaag

SEQ ID NO: 22043 - RNA, 65 nt, synthetic construct
  source 1..65: mol_type = other RNA
tttcaccaggaacatgtagacctgggggaaagccagagtcgggggaccccattcagcctccaaag

SEQ ID NO: 22044 - RNA, 65 nt, synthetic construct
  source 1..65: mol_type = other RNA
tttcaccaggaacatgtatacctgggggaaagccagagtcgggggaccccattcagcctccaaag

SEQ ID NO: 22045 - RNA, 66 nt, synthetic construct
  source 1..66: mol_type = other RNA
atttcaccaggaacatgtatacctgggggaaagccagagtcgggggaccccattcagcctccaaag

SEQ ID NO: 22046 - RNA, 66 nt, synthetic construct
  source 1..66: mol_type = other RNA
atttcaccaggaacatgtacacctgggggaaagccagagtcgggggaccccattcagcctccaaag

SEQ ID NO: 22047 - RNA, 66 nt, synthetic construct
  source 1..66: mol_type = other RNA
atttcaccaggaacatgtagacctgggggaaagccagagtcgggggaccccattcagcctccaaag

SEQ ID NO: 22048 - RNA, 66 nt, synthetic construct
  source 1..66: mol_type = other RNA
atttcaccaggaacatgtaaacctgggggaaagccagagtcgggggaccccattcagcctccaaag

SEQ ID NO: 22049 - RNA, 67 nt, synthetic construct
  source 1..67: mol_type = other RNA
catttcaccaggaacatgtaaacctgggggaaagccagagtcgggggaccccattcagcctccaaag

SEQ ID NO: 22050 - RNA, 67 nt, synthetic construct
  source 1..67: mol_type = other RNA
catttcaccaggaacatgtacacctgggggaaagccagagtcgggggaccccattcagcctccaaag

SEQ ID NO: 22051 - RNA, 67 nt, synthetic construct
  source 1..67: mol_type = other RNA
catttcaccaggaacatgtatacctgggggaaagccagagtcgggggaccccattcagcctccaaag

SEQ ID NO: 22052 - RNA, 67 nt, synthetic construct
  source 1..67: mol_type = other RNA
catttcaccaggaacatgtagacctgggggaaagccagagtcgggggaccccattcagcctccaaag

SEQ ID NO: 22053 - RNA, 68 nt, synthetic construct
  source 1..68: mol_type = other RNA
ccatttcaccaggaacatgtatacctgggggaaagccagagtcgggggaccccattcagcctccaaag

SEQ ID NO: 22054 - RNA, 68 nt, synthetic construct
  source 1..68: mol_type = other RNA
ccatttcaccaggaacatgtacacctgggggaaagccagagtcgggggaccccattcagcctccaaag

SEQ ID NO: 22055 - RNA, 68 nt, synthetic construct
  source 1..68: mol_type = other RNA
ccatttcaccaggaacatgtagacctgggggaaagccagagtcgggggaccccattcagcctccaaag

SEQ ID NO: 22056 - RNA, 68 nt, synthetic construct
  source 1..68: mol_type = other RNA
ccatttcaccaggaacatgtaaacctgggggaaagccagagtcgggggaccccattcagcctccaaag

SEQ ID NO: 22057 - RNA, 69 nt, synthetic construct
  source 1..69: mol_type = other RNA
gccatttcaccaggaacatgtagacctgggggaaagccagagtcgggggaccccattcagcctccaaag

SEQ ID NO: 22058 - RNA, 69 nt, synthetic construct
  source 1..69: mol_type = other RNA
gccatttcaccaggaacatgtacacctgggggaaagccagagtcgggggaccccattcagcctccaaag

SEQ ID NO: 22059 - RNA, 69 nt, synthetic construct
  source 1..69: mol_type = other RNA
gccatttcaccaggaacatgtaaacctgggggaaagccagagtcgggggaccccattcagcctccaaag

SEQ ID NO: 22060 - RNA, 69 nt, synthetic construct
  source 1..69: mol_type = other RNA
gccatttcaccaggaacatgtatacctgggggaaagccagagtcgggggaccccattcagcctccaaag

SEQ ID NO: 22061 - RNA, 70 nt, synthetic construct
  source 1..70: mol_type = other RNA
tgccatttcaccaggaacatgtagacctgggggaaagccagagtcgggggaccccattcagcctccaaag

SEQ ID NO: 22062 - RNA, 70 nt, synthetic construct
  source 1..70: mol_type = other RNA
tgccatttcaccaggaacatgtacacctgggggaaagccagagtcgggggaccccattcagcctccaaag

SEQ ID NO: 22063 - RNA, 70 nt, synthetic construct
  source 1..70: mol_type = other RNA
tgccatttcaccaggaacatgtaaacctgggggaaagccagagtcgggggaccccattcagcctccaaag

SEQ ID NO: 22064 - RNA, 70 nt, synthetic construct
  source 1..70: mol_type = other RNA
tgccatttcaccaggaacatgtatacctgggggaaagccagagtcgggggaccccattcagcctccaaag

SEQ ID NO: 22065 - RNA, 71 nt, synthetic construct
  source 1..71: mol_type = other RNA
ctgccatttcaccaggaacatgtatacctgggggaaagccagagtcgggggaccccattcagcctccaaag

SEQ ID NO: 22066 - RNA, 71 nt, synthetic construct
  source 1..71: mol_type = other RNA
ctgccatttcaccaggaacatgtacacctgggggaaagccagagtcgggggaccccattcagcctccaaag

SEQ ID NO: 22067 - RNA, 71 nt, synthetic construct
  source 1..71: mol_type = other RNA
ctgccatttcaccaggaacatgtaaacctgggggaaagccagagtcgggggaccccattcagcctccaaag

SEQ ID NO: 22068 - RNA, 71 nt, synthetic construct
  source 1..71: mol_type = other RNA
ctgccatttcaccaggaacatgtagacctgggggaaagccagagtcgggggaccccattcagcctccaaag

SEQ ID NO: 22069 - RNA, 72 nt, synthetic construct
  source 1..72: mol_type = other RNA
cctgccatttcaccaggaacatgtaaacctgggggaaagccagagtcgggggaccccattcagcctccaaag

SEQ ID NO: 22070 - RNA, 72 nt, synthetic construct
  source 1..72: mol_type = other RNA
cctgccatttcaccaggaacatgtatacctgggggaaagccagagtcgggggaccccattcagcctccaaag

SEQ ID NO: 22071 - RNA, 72 nt, synthetic construct
  source 1..72: mol_type = other RNA
cctgccatttcaccaggaacatgtagacctgggggaaagccagagtcgggggaccccattcagcctccaaag

SEQ ID NO: 22072 - RNA, 72 nt, synthetic construct
  source 1..72: mol_type = other RNA
cctgccatttcaccaggaacatgtacacctgggggaaagccagagtcgggggaccccattcagcctccaaag

SEQ ID NO: 22073 - RNA, 73 nt, synthetic construct
  source 1..73: mol_type = other RNA
tcctgccatttcaccaggaacatgtacacctgggggaaagccagagtcgggggaccccattcagcctccaaag

SEQ ID NO: 22074 - RNA, 73 nt, synthetic construct
  source 1..73: mol_type = other RNA
tcctgccatttcaccaggaacatgtaaacctgggggaaagccagagtcgggggaccccattcagcctccaaag

SEQ ID NO: 22075 - RNA, 73 nt, synthetic construct
  source 1..73: mol_type = other RNA
tcctgccatttcaccaggaacatgtagacctgggggaaagccagagtcgggggaccccattcagcctccaaag

SEQ ID NO: 22076 - RNA, 73 nt, synthetic construct
  source 1..73: mol_type = other RNA
tcctgccatttcaccaggaacatgtatacctgggggaaagccagagtcgggggaccccattcagcctccaaag

SEQ ID NO: 22077 - RNA, 74 nt, synthetic construct
  source 1..74: mol_type = other RNA
gtcctgccatttcaccaggaacatgtacacctgggggaaagccagagtcgggggaccccattcagcctccaaag

SEQ ID NO: 22078 - RNA, 74 nt, synthetic construct
  source 1..74: mol_type = other RNA
gtcctgccatttcaccaggaacatgtaaacctgggggaaagccagagtcgggggaccccattcagcctccaaag

SEQ ID NO: 22079 - RNA, 74 nt, synthetic construct
  source 1..74: mol_type = other RNA
gtcctgccatttcaccaggaacatgtatacctgggggaaagccagagtcgggggaccccattcagcctccaaag

SEQ ID NO: 22080 - RNA, 74 nt, synthetic construct
  source 1..74: mol_type = other RNA
gtcctgccatttcaccaggaacatgtagacctgggggaaagccagagtcgggggaccccattcagcctccaaag

SEQ ID NO: 22081 - RNA, 75 nt, synthetic construct
  source 1..75: mol_type = other RNA
ggtcctgccatttcaccaggaacatgtacacctgggggaaagccagagtcgggggaccccattcagcctccaaag

SEQ ID NO: 22082 - RNA, 75 nt, synthetic construct
  source 1..75: mol_type = other RNA
ggtcctgccatttcaccaggaacatgtaaacctgggggaaagccagagtcgggggaccccattcagcctccaaag

SEQ ID NO: 22083 - RNA, 75 nt, synthetic construct
  source 1..75: mol_type = other RNA
ggtcctgccatttcaccaggaacatgtagacctgggggaaagccagagtcgggggaccccattcagcctccaaag

SEQ ID NO: 22084 - RNA, 75 nt, synthetic construct
  source 1..75: mol_type = other RNA
ggtcctgccatttcaccaggaacatgtatacctgggggaaagccagagtcgggggaccccattcagcctccaaag

SEQ ID NO: 22085 - RNA, 76 nt, synthetic construct
  source 1..76: mol_type = other RNA
aggtcctgccatttcaccaggaacatgtaaacctgggggaaagccagagtcgggggaccccattcagcctccaaag

SEQ ID NO: 22086 - RNA, 76 nt, synthetic construct
  source 1..76: mol_type = other RNA
aggtcctgccatttcaccaggaacatgtatacctgggggaaagccagagtcgggggaccccattcagcctccaaag

SEQ ID NO: 22087 - RNA, 76 nt, synthetic construct
  source 1..76: mol_type = other RNA
aggtcctgccatttcaccaggaacatgtagacctgggggaaagccagagtcgggggaccccattcagcctccaaag

SEQ ID NO: 22088 - RNA, 76 nt, synthetic construct
  source 1..76: mol_type = other RNA
aggtcctgccatttcaccaggaacatgtacacctgggggaaagccagagtcgggggaccccattcagcctccaaag

SEQ ID NO: 22089 - RNA, 77 nt, synthetic construct
  source 1..77: mol_type = other RNA
caggtcctgccatttcaccaggaacatgtatacctgggggaaagccagagtcgggggaccccattcagcctccaaag

SEQ ID NO: 22090 - RNA, 77 nt, synthetic construct
  source 1..77: mol_type = other RNA
caggtcctgccatttcaccaggaacatgtagacctgggggaaagccagagtcgggggaccccattcagcctccaaag

SEQ ID NO: 22091 - RNA, 77 nt, synthetic construct
  source 1..77: mol_type = other RNA
caggtcctgccatttcaccaggaacatgtacacctgggggaaagccagagtcgggggaccccattcagcctccaaag

SEQ ID NO: 22092 - RNA, 77 nt, synthetic construct
  source 1..77: mol_type = other RNA
caggtcctgccatttcaccaggaacatgtaaacctgggggaaagccagagtcgggggaccccattcagcctccaaag

SEQ ID NO: 22093 - RNA, 78 nt, synthetic construct
  source 1..78: mol_type = other RNA
acaggtcctgccatttcaccaggaacatgtacacctgggggaaagccagagtcgggggaccccattcagcctccaaag

SEQ ID NO: 22094 - RNA, 78 nt, synthetic construct
  source 1..78: mol_type = other RNA
acaggtcctgccatttcaccaggaacatgtatacctgggggaaagccagagtcgggggaccccattcagcctccaaag

SEQ ID NO: 22095 - RNA, 78 nt, synthetic construct
  source 1..78: mol_type = other RNA
acaggtcctgccatttcaccaggaacatgtaaacctgggggaaagccagagtcgggggaccccattcagcctccaaag

SEQ ID NO: 22096 - RNA, 78 nt, synthetic construct
  source 1..78: mol_type = other RNA
acaggtcctgccatttcaccaggaacatgtagacctgggggaaagccagagtcgggggaccccattcagcctccaaag

SEQ ID NO: 22097 - RNA, 79 nt, synthetic construct
  source 1..79: mol_type = other RNA
gacaggtcctgccatttcaccaggaacatgtagacctgggggaaagccagagtcgggggaccccattcagcctccaaag

SEQ ID NO: 22098 - RNA, 79 nt, synthetic construct
  source 1..79: mol_type = other RNA
gacaggtcctgccatttcaccaggaacatgtaaacctgggggaaagccagagtcgggggaccccattcagcctccaaag

SEQ ID NO: 22099 - RNA, 79 nt, synthetic construct
  source 1..79: mol_type = other RNA
gacaggtcctgccatttcaccaggaacatgtatacctgggggaaagccagagtcgggggaccccattcagcctccaaag

SEQ ID NO: 22100 - RNA, 79 nt, synthetic construct
  source 1..79: mol_type = other RNA
gacaggtcctgccatttcaccaggaacatgtacacctgggggaaagccagagtcgggggaccccattcagcctccaaag

SEQ ID NO: 22101 - RNA, 80 nt, synthetic construct
  source 1..80: mol_type = other RNA
cgacaggtcctgccatttcaccaggaacatgtagacctgggggaaagccagagtcgggggaccccattcagcctccaaag

SEQ ID NO: 22102 - RNA, 80 nt, synthetic construct
  source 1..80: mol_type = other RNA
cgacaggtcctgccatttcaccaggaacatgtaaacctgggggaaagccagagtcgggggaccccattcagcctccaaag

SEQ ID NO: 22103 - RNA, 80 nt, synthetic construct
  source 1..80: mol_type = other RNA
cgacaggtcctgccatttcaccaggaacatgtatacctgggggaaagccagagtcgggggaccccattcagcctccaaag

SEQ ID NO: 22104 - RNA, 80 nt, synthetic construct
  source 1..80: mol_type = other RNA
cgacaggtcctgccatttcaccaggaacatgtacacctgggggaaagccagagtcgggggaccccattcagcctccaaag

SEQ ID NO: 22105 - RNA, 81 nt, synthetic construct
  source 1..81: mol_type = other RNA
ccgacaggtcctgccatttcaccaggaacatgtaaacctgggggaaagccagagtcgggggaccccattcagcctccaaag

SEQ ID NO: 22106 - RNA, 81 nt, synthetic construct
  source 1..81: mol_type = other RNA
ccgacaggtcctgccatttcaccaggaacatgtacacctgggggaaagccagagtcgggggaccccattcagcctccaaag

SEQ ID NO: 22107 - RNA, 81 nt, synthetic construct
  source 1..81: mol_type = other RNA
ccgacaggtcctgccatttcaccaggaacatgtagacctgggggaaagccagagtcgggggaccccattcagcctccaaag

SEQ ID NO: 22108 - RNA, 81 nt, synthetic construct
  source 1..81: mol_type = other RNA
ccgacaggtcctgccatttcaccaggaacatgtatacctgggggaaagccagagtcgggggaccccattcagcctccaaag

SEQ ID NO: 22109 - RNA, 82 nt, synthetic construct
  source 1..82: mol_type = other RNA
tccgacaggtcctgccatttcaccaggaacatgtagacctgggggaaagccagagtcgggggaccccattcagcctccaaag

SEQ ID NO: 22110 - RNA, 82 nt, synthetic construct
  source 1..82: mol_type = other RNA
tccgacaggtcctgccatttcaccaggaacatgtatacctgggggaaagccagagtcgggggaccccattcagcctccaaag

SEQ ID NO: 22111 - RNA, 82 nt, synthetic construct
  source 1..82: mol_type = other RNA
tccgacaggtcctgccatttcaccaggaacatgtaaacctgggggaaagccagagtcgggggaccccattcagcctccaaag

SEQ ID NO: 22112 - RNA, 82 nt, synthetic construct
  source 1..82: mol_type = other RNA
tccgacaggtcctgccatttcaccaggaacatgtacacctgggggaaagccagagtcgggggaccccattcagcctccaaag

SEQ ID NO: 22113 - RNA, 83 nt, synthetic construct
  source 1..83: mol_type = other RNA
ctccgacaggtcctgccatttcaccaggaacatgtacacctgggggaaagccagagtcgggggaccccattcagcctccaaag

SEQ ID NO: 22114 - RNA, 83 nt, synthetic construct
  source 1..83: mol_type = other RNA
ctccgacaggtcctgccatttcaccaggaacatgtaaacctgggggaaagccagagtcgggggaccccattcagcctccaaag

SEQ ID NO: 22115 - RNA, 83 nt, synthetic construct
  source 1..83: mol_type = other RNA
ctccgacaggtcctgccatttcaccaggaacatgtatacctgggggaaagccagagtcgggggaccccattcagcctccaaag

SEQ ID NO: 22116 - RNA, 83 nt, synthetic construct
  source 1..83: mol_type = other RNA
ctccgacaggtcctgccatttcaccaggaacatgtagacctgggggaaagccagagtcgggggaccccattcagcctccaaag

SEQ ID NO: 22117 - RNA, 84 nt, synthetic construct
  source 1..84: mol_type = other RNA
tctccgacaggtcctgccatttcaccaggaacatgtacacctgggggaaagccagagtcgggggaccccattcagcctccaaag

SEQ ID NO: 22118 - RNA, 84 nt, synthetic construct
  source 1..84: mol_type = other RNA
tctccgacaggtcctgccatttcaccaggaacatgtaaacctgggggaaagccagagtcgggggaccccattcagcctccaaag

SEQ ID NO: 22119 - RNA, 84 nt, synthetic construct
  source 1..84: mol_type = other RNA
tctccgacaggtcctgccatttcaccaggaacatgtatacctgggggaaagccagagtcgggggaccccattcagcctccaaag

SEQ ID NO: 22120 - RNA, 84 nt, synthetic construct
  source 1..84: mol_type = other RNA
tctccgacaggtcctgccatttcaccaggaacatgtagacctgggggaaagccagagtcgggggaccccattcagcctccaaag

SEQ ID NO: 22121 - RNA, 85 nt, synthetic construct
  source 1..85: mol_type = other RNA
ttctccgacaggtcctgccatttcaccaggaacatgtagacctgggggaaagccagagtcgggggaccccattcagcctccaaag

SEQ ID NO: 22122 - RNA, 85 nt, synthetic construct
  source 1..85: mol_type = other RNA
ttctccgacaggtcctgccatttcaccaggaacatgtaaacctgggggaaagccagagtcgggggaccccattcagcctccaaag

SEQ ID NO: 22123 - RNA, 85 nt, synthetic construct
  source 1..85: mol_type = other RNA
ttctccgacaggtcctgccatttcaccaggaacatgtacacctgggggaaagccagagtcgggggaccccattcagcctccaaag

SEQ ID NO: 22124 - RNA, 85 nt, synthetic construct
  source 1..85: mol_type = other RNA
ttctccgacaggtcctgccatttcaccaggaacatgtatacctgggggaaagccagagtcgggggaccccattcagcctccaaag

SEQ ID NO: 22125 - RNA, 86 nt, synthetic construct
  source 1..86: mol_type = other RNA
cttctccgacaggtcctgccatttcaccaggaacatgtatacctgggggaaagccagagtcgggggaccccattcagcctccaaag

SEQ ID NO: 22126 - RNA, 86 nt, synthetic construct
  source 1..86: mol_type = other RNA
cttctccgacaggtcctgccatttcaccaggaacatgtagacctgggggaaagccagagtcgggggaccccattcagcctccaaag

SEQ ID NO: 22127 - RNA, 86 nt, synthetic construct
  source 1..86: mol_type = other RNA
cttctccgacaggtcctgccatttcaccaggaacatgtacacctgggggaaagccagagtcgggggaccccattcagcctccaaag

SEQ ID NO: 22128 - RNA, 86 nt, synthetic construct
  source 1..86: mol_type = other RNA
cttctccgacaggtcctgccatttcaccaggaacatgtaaacctgggggaaagccagagtcgggggaccccattcagcctccaaag

SEQ ID NO: 22129 - RNA, 87 nt, synthetic construct
  source 1..87: mol_type = other RNA
ccttctccgacaggtcctgccatttcaccaggaacatgtagacctgggggaaagccagagtcgggggaccccattcagcctccaaag

SEQ ID NO: 22130 - RNA, 87 nt, synthetic construct
  source 1..87: mol_type = other RNA
ccttctccgacaggtcctgccatttcaccaggaacatgtatacctgggggaaagccagagtcgggggaccccattcagcctccaaag

SEQ ID NO: 22131 - RNA, 87 nt, synthetic construct
  source 1..87: mol_type = other RNA
ccttctccgacaggtcctgccatttcaccaggaacatgtacacctgggggaaagccagagtcgggggaccccattcagcctccaaag

SEQ ID NO: 22132 - RNA, 87 nt, synthetic construct
  source 1..87: mol_type = other RNA
ccttctccgacaggtcctgccatttcaccaggaacatgtaaacctgggggaaagccagagtcgggggaccccattcagcctccaaag

SEQ ID NO: 22133 - RNA, 88 nt, synthetic construct
  source 1..88: mol_type = other RNA
accttctccgacaggtcctgccatttcaccaggaacatgtaaacctgggggaaagccagagtcgggggaccccattcagcctccaaag

SEQ ID NO: 22134 - RNA, 88 nt, synthetic construct
  source 1..88: mol_type = other RNA
accttctccgacaggtcctgccatttcaccaggaacatgtatacctgggggaaagccagagtcgggggaccccattcagcctccaaag

SEQ ID NO: 22135 - RNA, 88 nt, synthetic construct
  source 1..88: mol_type = other RNA
accttctccgacaggtcctgccatttcaccaggaacatgtacacctgggggaaagccagagtcgggggaccccattcagcctccaaag

SEQ ID NO: 22136 - RNA, 88 nt, synthetic construct
  source 1..88: mol_type = other RNA
accttctccgacaggtcctgccatttcaccaggaacatgtagacctgggggaaagccagagtcgggggaccccattcagcctccaaag

SEQ ID NO: 22137 - RNA, 89 nt, synthetic construct
  source 1..89: mol_type = other RNA
caccttctccgacaggtcctgccatttcaccaggaacatgtacacctgggggaaagccagagtcgggggaccccattcagcctccaaag

SEQ ID NO: 22138 - RNA, 89 nt, synthetic construct
  source 1..89: mol_type = other RNA
caccttctccgacaggtcctgccatttcaccaggaacatgtaaacctgggggaaagccagagtcgggggaccccattcagcctccaaag

SEQ ID NO: 22139 - RNA, 89 nt, synthetic construct
  source 1..89: mol_type = other RNA
caccttctccgacaggtcctgccatttcaccaggaacatgtagacctgggggaaagccagagtcgggggaccccattcagcctccaaag

SEQ ID NO: 22140 - RNA, 89 nt, synthetic construct
  source 1..89: mol_type = other RNA
caccttctccgacaggtcctgccatttcaccaggaacatgtatacctgggggaaagccagagtcgggggaccccattcagcctccaaag

SEQ ID NO: 22141 - RNA, 90 nt, synthetic construct
  source 1..90: mol_type = other RNA
ccaccttctccgacaggtcctgccatttcaccaggaacatgtacacctgggggaaagccagagtcgggggaccccattcagcctccaaag

SEQ ID NO: 22142 - RNA, 90 nt, synthetic construct
  source 1..90: mol_type = other RNA
ccaccttctccgacaggtcctgccatttcaccaggaacatgtatacctgggggaaagccagagtcgggggaccccattcagcctccaaag

SEQ ID NO: 22143 - RNA, 90 nt, synthetic construct
  source 1..90: mol_type = other RNA
ccaccttctccgacaggtcctgccatttcaccaggaacatgtagacctgggggaaagccagagtcgggggaccccattcagcctccaaag

SEQ ID NO: 22144 - RNA, 90 nt, synthetic construct
  source 1..90: mol_type = other RNA
ccaccttctccgacaggtcctgccatttcaccaggaacatgtaaacctgggggaaagccagagtcgggggaccccattcagcctccaaag

SEQ ID NO: 22145 - RNA, 91 nt, synthetic construct
  source 1..91: mol_type = other RNA
accaccttctccgacaggtcctgccatttcaccaggaacatgtatacctgggggaaagccagagtcgggggaccccattcagcctccaaag

SEQ ID NO: 22146 - RNA, 91 nt, synthetic construct
  source 1..91: mol_type = other RNA
accaccttctccgacaggtcctgccatttcaccaggaacatgtacacctgggggaaagccagagtcgggggaccccattcagcctccaaag

SEQ ID NO: 22147 - RNA, 91 nt, synthetic construct
  source 1..91: mol_type = other RNA
accaccttctccgacaggtcctgccatttcaccaggaacatgtagacctgggggaaagccagagtcgggggaccccattcagcctccaaag

SEQ ID NO: 22148 - RNA, 91 nt, synthetic construct
  source 1..91: mol_type = other RNA
accaccttctccgacaggtcctgccatttcaccaggaacatgtaaacctgggggaaagccagagtcgggggaccccattcagcctccaaag

SEQ ID NO: 22149 - RNA, 92 nt, synthetic construct
  source 1..92: mol_type = other RNA
gaccaccttctccgacaggtcctgccatttcaccaggaacatgtatacctgggggaaagccagagtcgggggaccccattcagcctccaaag

SEQ ID NO: 22150 - RNA, 92 nt, synthetic construct
  source 1..92: mol_type = other RNA
gaccaccttctccgacaggtcctgccatttcaccaggaacatgtagacctgggggaaagccagagtcgggggaccccattcagcctccaaag

SEQ ID NO: 22151 - RNA, 92 nt, synthetic construct
  source 1..92: mol_type = other RNA
gaccaccttctccgacaggtcctgccatttcaccaggaacatgtacacctgggggaaagccagagtcgggggaccccattcagcctccaaag

SEQ ID NO: 22152 - RNA, 92 nt, synthetic construct
  source 1..92: mol_type = other RNA
gaccaccttctccgacaggtcctgccatttcaccaggaacatgtaaacctgggggaaagccagagtcgggggaccccattcagcctccaaag

SEQ ID NO: 22153 - RNA, 93 nt, synthetic construct
  source 1..93: mol_type = other RNA
agaccaccttctccgacaggtcctgccatttcaccaggaacatgtagacctgggggaaagccagagtcgggggaccccattcagcctccaaag

SEQ ID NO: 22154 - RNA, 93 nt, synthetic construct
  source 1..93: mol_type = other RNA
agaccaccttctccgacaggtcctgccatttcaccaggaacatgtatacctgggggaaagccagagtcgggggaccccattcagcctccaaag

SEQ ID NO: 22155 - RNA, 93 nt, synthetic construct
  source 1..93: mol_type = other RNA
agaccaccttctccgacaggtcctgccatttcaccaggaacatgtacacctgggggaaagccagagtcgggggaccccattcagcctccaaag

SEQ ID NO: 22156 - RNA, 93 nt, synthetic construct
  source 1..93: mol_type = other RNA
agaccaccttctccgacaggtcctgccatttcaccaggaacatgtaaacctgggggaaagccagagtcgggggaccccattcagcctccaaag

SEQ ID NO: 22157 - RNA, 94 nt, synthetic construct
  source 1..94: mol_type = other RNA
tagaccaccttctccgacaggtcctgccatttcaccaggaacatgtacacctgggggaaagccagagtcgggggaccccattcagcctccaaag

SEQ ID NO: 22158 - RNA, 94 nt, synthetic construct
  source 1..94: mol_type = other RNA
tagaccaccttctccgacaggtcctgccatttcaccaggaacatgtaaacctgggggaaagccagagtcgggggaccccattcagcctccaaag

SEQ ID NO: 22159 - RNA, 94 nt, synthetic construct
  source 1..94: mol_type = other RNA
tagaccaccttctccgacaggtcctgccatttcaccaggaacatgtatacctgggggaaagccagagtcgggggaccccattcagcctccaaag

SEQ ID NO: 22160 - RNA, 94 nt, synthetic construct
  source 1..94: mol_type = other RNA
tagaccaccttctccgacaggtcctgccatttcaccaggaacatgtagacctgggggaaagccagagtcgggggaccccattcagcctccaaag

SEQ ID NO: 22161 - RNA, 95 nt, synthetic construct
  source 1..95: mol_type = other RNA
gtagaccaccttctccgacaggtcctgccatttcaccaggaacatgtaaacctgggggaaagccagagtcgggggaccccattcagcctccaaag

SEQ ID NO: 22162 - RNA, 95 nt, synthetic construct
  source 1..95: mol_type = other RNA
gtagaccaccttctccgacaggtcctgccatttcaccaggaacatgtagacctgggggaaagccagagtcgggggaccccattcagcctccaaag

SEQ ID NO: 22163 - RNA, 95 nt, synthetic construct
  source 1..95: mol_type = other RNA
gtagaccaccttctccgacaggtcctgccatttcaccaggaacatgtacacctgggggaaagccagagtcgggggaccccattcagcctccaaag

SEQ ID NO: 22164 - RNA, 95 nt, synthetic construct
  source 1..95: mol_type = other RNA
gtagaccaccttctccgacaggtcctgccatttcaccaggaacatgtatacctgggggaaagccagagtcgggggaccccattcagcctccaaag

SEQ ID NO: 22165 - RNA, 96 nt, synthetic construct
  source 1..96: mol_type = other RNA
ggtagaccaccttctccgacaggtcctgccatttcaccaggaacatgtacacctgggggaaagccagagtcgggggaccccattcagcctccaaag

SEQ ID NO: 22166 - RNA, 96 nt, synthetic construct
  source 1..96: mol_type = other RNA
ggtagaccaccttctccgacaggtcctgccatttcaccaggaacatgtagacctgggggaaagccagagtcgggggaccccattcagcctccaaag

SEQ ID NO: 22167 - RNA, 96 nt, synthetic construct
  source 1..96: mol_type = other RNA
ggtagaccaccttctccgacaggtcctgccatttcaccaggaacatgtatacctgggggaaagccagagtcgggggaccccattcagcctccaaag

SEQ ID NO: 22168 - RNA, 96 nt, synthetic construct
  source 1..96: mol_type = other RNA
ggtagaccaccttctccgacaggtcctgccatttcaccaggaacatgtaaacctgggggaaagccagagtcgggggaccccattcagcctccaaag

SEQ ID NO: 22169 - RNA, 97 nt, synthetic construct
  source 1..97: mol_type = other RNA
cggtagaccaccttctccgacaggtcctgccatttcaccaggaacatgtacacctgggggaaagccagagtcgggggaccccattcagcctccaaag

SEQ ID NO: 22170 - RNA, 97 nt, synthetic construct
  source 1..97: mol_type = other RNA
cggtagaccaccttctccgacaggtcctgccatttcaccaggaacatgtatacctgggggaaagccagagtcgggggaccccattcagcctccaaag

SEQ ID NO: 22171 - RNA, 97 nt, synthetic construct
  source 1..97: mol_type = other RNA
cggtagaccaccttctccgacaggtcctgccatttcaccaggaacatgtaaacctgggggaaagccagagtcgggggaccccattcagcctccaaag

SEQ ID NO: 22172 - RNA, 97 nt, synthetic construct
  source 1..97: mol_type = other RNA
cggtagaccaccttctccgacaggtcctgccatttcaccaggaacatgtagacctgggggaaagccagagtcgggggaccccattcagcctccaaag

SEQ ID NO: 22173 - RNA, 98 nt, synthetic construct
  source 1..98: mol_type = other RNA
ccggtagaccaccttctccgacaggtcctgccatttcaccaggaacatgtacacctgggggaaagccagagtcgggggaccccattcagcctccaaag

SEQ ID NO: 22174 - RNA, 98 nt, synthetic construct
  source 1..98: mol_type = other RNA
ccggtagaccaccttctccgacaggtcctgccatttcaccaggaacatgtagacctgggggaaagccagagtcgggggaccccattcagcctccaaag

SEQ ID NO: 22175 - RNA, 98 nt, synthetic construct
  source 1..98: mol_type = other RNA
ccggtagaccaccttctccgacaggtcctgccatttcaccaggaacatgtatacctgggggaaagccagagtcgggggaccccattcagcctccaaag

SEQ ID NO: 22176 - RNA, 98 nt, synthetic construct
  source 1..98: mol_type = other RNA
ccggtagaccaccttctccgacaggtcctgccatttcaccaggaacatgtaaacctgggggaaagccagagtcgggggaccccattcagcctccaaag

SEQ ID NO: 22177 - RNA, 99 nt, synthetic construct
  source 1..99: mol_type = other RNA
gccggtagaccaccttctccgacaggtcctgccatttcaccaggaacatgtaaacctgggggaaagccagagtcgggggaccccattcagcctccaaag

SEQ ID NO: 22178 - RNA, 99 nt, synthetic construct
  source 1..99: mol_type = other RNA
gccggtagaccaccttctccgacaggtcctgccatttcaccaggaacatgtacacctgggggaaagccagagtcgggggaccccattcagcctccaaag

SEQ ID NO: 22179 - RNA, 99 nt, synthetic construct
  source 1..99: mol_type = other RNA
gccggtagaccaccttctccgacaggtcctgccatttcaccaggaacatgtatacctgggggaaagccagagtcgggggaccccattcagcctccaaag

SEQ ID NO: 22180 - RNA, 99 nt, synthetic construct
  source 1..99: mol_type = other RNA
gccggtagaccaccttctccgacaggtcctgccatttcaccaggaacatgtagacctgggggaaagccagagtcgggggaccccattcagcctccaaag

SEQ ID NO: 22181 - RNA, 100 nt, synthetic construct
  source 1..100: mol_type = other RNA
cgccggtagaccaccttctccgacaggtcctgccatttcaccaggaacatgtaaacctgggggaaagccagagtcgggggaccccattcagcctccaaag

SEQ ID NO: 22182 - RNA, 100 nt, synthetic construct
  source 1..100: mol_type = other RNA
cgccggtagaccaccttctccgacaggtcctgccatttcaccaggaacatgtacacctgggggaaagccagagtcgggggaccccattcagcctccaaag

SEQ ID NO: 22183 - RNA, 100 nt, synthetic construct
  source 1..100: mol_type = other RNA
cgccggtagaccaccttctccgacaggtcctgccatttcaccaggaacatgtagacctgggggaaagccagagtcgggggaccccattcagcctccaaag

SEQ ID NO: 22184 - RNA, 100 nt, synthetic construct
  source 1..100: mol_type = other RNA
cgccggtagaccaccttctccgacaggtcctgccatttcaccaggaacatgtatacctgggggaaagccagagtcgggggaccccattcagcctccaaag

SEQ ID NO: 22185 - RNA, 101 nt, synthetic construct
  source 1..101: mol_type = other RNA
gcgccggtagaccaccttctccgacaggtcctgccatttcaccaggaacatgtatacctgggggaaagccagagtcgggggaccccattcagcctccaaag

SEQ ID NO: 22186 - RNA, 101 nt, synthetic construct
  source 1..101: mol_type = other RNA
gcgccggtagaccaccttctccgacaggtcctgccatttcaccaggaacatgtagacctgggggaaagccagagtcgggggaccccattcagcctccaaag

SEQ ID NO: 22187 - RNA, 101 nt, synthetic construct
  source 1..101: mol_type = other RNA
gcgccggtagaccaccttctccgacaggtcctgccatttcaccaggaacatgtaaacctgggggaaagccagagtcgggggaccccattcagcctccaaag

SEQ ID NO: 22188 - RNA, 101 nt, synthetic construct
  source 1..101: mol_type = other RNA
gcgccggtagaccaccttctccgacaggtcctgccatttcaccaggaacatgtacacctgggggaaagccagagtcgggggaccccattcagcctccaaag

SEQ ID NO: 22189 - RNA, 102 nt, synthetic construct
  source 1..102: mol_type = other RNA
agcgccggtagaccaccttctccgacaggtcctgccatttcaccaggaacatgtatacctgggggaaagccagagtcgggggaccccattcagcctccaaag

SEQ ID NO: 22190 - RNA, 102 nt, synthetic construct
  source 1..102: mol_type = other RNA
agcgccggtagaccaccttctccgacaggtcctgccatttcaccaggaacatgtacacctgggggaaagccagagtcgggggaccccattcagcctccaaag

SEQ ID NO: 22191 - RNA, 102 nt, synthetic construct
  source 1..102: mol_type = other RNA
agcgccggtagaccaccttctccgacaggtcctgccatttcaccaggaacatgtaaacctgggggaaagccagagtcgggggaccccattcagcctccaaag

SEQ ID NO: 22192 - RNA, 102 nt, synthetic construct
  source 1..102: mol_type = other RNA
agcgccggtagaccaccttctccgacaggtcctgccatttcaccaggaacatgtagacctgggggaaagccagagtcgggggaccccattcagcctccaaag

SEQ ID NO: 22193 - RNA, 103 nt, synthetic construct
  source 1..103: mol_type = other RNA
aagcgccggtagaccaccttctccgacaggtcctgccatttcaccaggaacatgtacacctgggggaaagccagagtcgggggaccccattcagcctccaaag

SEQ ID NO: 22194 - RNA, 103 nt, synthetic construct
  source 1..103: mol_type = other RNA
aagcgccggtagaccaccttctccgacaggtcctgccatttcaccaggaacatgtaaacctgggggaaagccagagtcgggggaccccattcagcctccaaag

SEQ ID NO: 22195 - RNA, 103 nt, synthetic construct
  source 1..103: mol_type = other RNA
aagcgccggtagaccaccttctccgacaggtcctgccatttcaccaggaacatgtagacctgggggaaagccagagtcgggggaccccattcagcctccaaag

SEQ ID NO: 22196 - RNA, 103 nt, synthetic construct
  source 1..103: mol_type = other RNA
aagcgccggtagaccaccttctccgacaggtcctgccatttcaccaggaacatgtatacctgggggaaagccagagtcgggggaccccattcagcctccaaag

SEQ ID NO: 22197 - RNA, 16 nt, synthetic construct
  source 1..16: mol_type = other RNA
ctttggaggctgaatg

SEQ ID NO: 22198 - RNA, 17 nt, synthetic construct
  source 1..17: mol_type = other RNA
tctttggaggctgaatg

SEQ ID NO: 22199 - RNA, 18 nt, synthetic construct
  source 1..18: mol_type = other RNA
ctctttggaggctgaatg

SEQ ID NO: 22200 - RNA, 19 nt, synthetic construct
  source 1..19: mol_type = other RNA
cctctttggaggctgaatg

SEQ ID NO: 22201 - RNA, 20 nt, synthetic construct
  source 1..20: mol_type = other RNA
gcctctttggaggctgaatg

SEQ ID NO: 22202 - RNA, 21 nt, synthetic construct
  source 1..21: mol_type = other RNA
agcctctttggaggctgaatg

SEQ ID NO: 22203 - RNA, 22 nt, synthetic construct
  source 1..22: mol_type = other RNA
aagcctctttggaggctgaatg

SEQ ID NO: 22204-22210 - skipped (7 entries)

SEQ ID NO: 22211 - RNA, 10 nt, synthetic construct
  source 1..10: mol_type = other RNA
tcagcctcca

SEQ ID NO: 22212 - RNA, 11 nt, synthetic construct
  source 1..11: mol_type = other RNA
tcagcctccaa

SEQ ID NO: 22213 - RNA, 12 nt, synthetic construct
  source 1..12: mol_type = other RNA
tcagcctccaaa

SEQ ID NO: 22214 - RNA, 13 nt, synthetic construct
  source 1..13: mol_type = other RNA
tcagcctccaaag

SEQ ID NO: 22215 - RNA, 14 nt, synthetic construct
  source 1..14: mol_type = other RNA
tcagcctccaaaga

SEQ ID NO: 22216 - RNA, 15 nt, synthetic construct
  source 1..15: mol_type = other RNA
tcagcctccaaagag

SEQ ID NO: 22217 - RNA, 16 nt, synthetic construct
  source 1..16: mol_type = other RNA
tcagcctccaaagagg

SEQ ID NO: 22218 - RNA, 17 nt, synthetic construct
  source 1..17: mol_type = other RNA
tcagcctccaaagaggc

SEQ ID NO: 22219 - RNA, 18 nt, synthetic construct
  source 1..18: mol_type = other RNA
tcagcctccaaagaggct

SEQ ID NO: 22220 - RNA, 19 nt, synthetic construct
  source 1..19: mol_type = other RNA
tcagcctccaaagaggctt

SEQ ID NO: 22221 - RNA, 33 nt, synthetic construct
  source 1..33: mol_type = other RNA
acctgggggaaagccagagtcgggggaccccat

SEQ ID NO: 22222 - RNA, 34 nt, synthetic construct
  source 1..34: mol_type = other RNA
tacctgggggaaagccagagtcgggggaccccat

SEQ ID NO: 22223 - RNA, 34 nt, synthetic construct
  source 1..34: mol_type = other RNA
aacctgggggaaagccagagtcgggggaccccat

SEQ ID NO: 22224 - RNA, 34 nt, synthetic construct
  source 1..34: mol_type = other RNA
cacctgggggaaagccagagtcgggggaccccat

SEQ ID NO: 22225 - RNA, 34 nt, synthetic construct
  source 1..34: mol_type = other RNA
gacctgggggaaagccagagtcgggggaccccat

SEQ ID NO: 22226 - RNA, 35 nt, synthetic construct
  source 1..35: mol_type = other RNA
agacctgggggaaagccagagtcgggggaccccat

SEQ ID NO: 22227 - RNA, 35 nt, synthetic construct
  source 1..35: mol_type = other RNA
atacctgggggaaagccagagtcgggggaccccat

SEQ ID NO: 22228 - RNA, 35 nt, synthetic construct
  source 1..35: mol_type = other RNA
aaacctgggggaaagccagagtcgggggaccccat

SEQ ID NO: 22229 - RNA, 35 nt, synthetic construct
  source 1..35: mol_type = other RNA
acacctgggggaaagccagagtcgggggaccccat

SEQ ID NO: 22230 - RNA, 36 nt, synthetic construct
  source 1..36: mol_type = other RNA
tagacctgggggaaagccagagtcgggggaccccat

SEQ ID NO: 22231 - RNA, 36 nt, synthetic construct
  source 1..36: mol_type = other RNA
taaacctgggggaaagccagagtcgggggaccccat

SEQ ID NO: 22232 - RNA, 36 nt, synthetic construct
  source 1..36: mol_type = other RNA
tacacctgggggaaagccagagtcgggggaccccat

SEQ ID NO: 22233 - RNA, 36 nt, synthetic construct
  source 1..36: mol_type = other RNA
tatacctgggggaaagccagagtcgggggaccccat

SEQ ID NO: 22234 - RNA, 37 nt, synthetic construct
  source 1..37: mol_type = other RNA
gtatacctgggggaaagccagagtcgggggaccccat

SEQ ID NO: 22235 - RNA, 37 nt, synthetic construct
  source 1..37: mol_type = other RNA
gtacacctgggggaaagccagagtcgggggaccccat

SEQ ID NO: 22236 - RNA, 37 nt, synthetic construct
  source 1..37: mol_type = other RNA
gtaaacctgggggaaagccagagtcgggggaccccat

SEQ ID NO: 22237 - RNA, 37 nt, synthetic construct
  source 1..37: mol_type = other RNA
gtagacctgggggaaagccagagtcgggggaccccat

SEQ ID NO: 22238 - RNA, 38 nt, synthetic construct
  source 1..38: mol_type = other RNA
tgtacacctgggggaaagccagagtcgggggaccccat

SEQ ID NO: 22239 - RNA, 38 nt, synthetic construct
  source 1..38: mol_type = other RNA
tgtagacctgggggaaagccagagtcgggggaccccat

SEQ ID NO: 22240 - RNA, 38 nt, synthetic construct
  source 1..38: mol_type = other RNA
tgtaaacctgggggaaagccagagtcgggggaccccat

SEQ ID NO: 22241 - RNA, 38 nt, synthetic construct
  source 1..38: mol_type = other RNA
tgtatacctgggggaaagccagagtcgggggaccccat

SEQ ID NO: 22242 - RNA, 39 nt, synthetic construct
  source 1..39: mol_type = other RNA
atgtagacctgggggaaagccagagtcgggggaccccat

SEQ ID NO: 22243 - RNA, 39 nt, synthetic construct
  source 1..39: mol_type = other RNA
atgtacacctgggggaaagccagagtcgggggaccccat

SEQ ID NO: 22244 - RNA, 39 nt, synthetic construct
  source 1..39: mol_type = other RNA
atgtaaacctgggggaaagccagagtcgggggaccccat

SEQ ID NO: 22245 - RNA, 39 nt, synthetic construct
  source 1..39: mol_type = other RNA
atgtatacctgggggaaagccagagtcgggggaccccat

SEQ ID NO: 22246 - RNA, 40 nt, synthetic construct
  source 1..40: mol_type = other RNA
catgtacacctgggggaaagccagagtcgggggaccccat

SEQ ID NO: 22247 - RNA, 40 nt, synthetic construct
  source 1..40: mol_type = other RNA
catgtaaacctgggggaaagccagagtcgggggaccccat

SEQ ID NO: 22248 - RNA, 40 nt, synthetic construct
  source 1..40: mol_type = other RNA
catgtagacctgggggaaagccagagtcgggggaccccat

SEQ ID NO: 22249 - RNA, 40 nt, synthetic construct
  source 1..40: mol_type = other RNA
catgtatacctgggggaaagccagagtcgggggaccccat

SEQ ID NO: 22250 - RNA, 41 nt, synthetic construct
  source 1..41: mol_type = other RNA
acatgtatacctgggggaaagccagagtcgggggaccccat

SEQ ID NO: 22251 - RNA, 41 nt, synthetic construct
  source 1..41: mol_type = other RNA
acatgtagacctgggggaaagccagagtcgggggaccccat

SEQ ID NO: 22252 - RNA, 41 nt, synthetic construct
  source 1..41: mol_type = other RNA
acatgtacacctgggggaaagccagagtcgggggaccccat

SEQ ID NO: 22253 - RNA, 41 nt, synthetic construct
  source 1..41: mol_type = other RNA
acatgtaaacctgggggaaagccagagtcgggggaccccat

SEQ ID NO: 22254 - RNA, 42 nt, synthetic construct
  source 1..42: mol_type = other RNA
aacatgtacacctgggggaaagccagagtcgggggaccccat

SEQ ID NO: 22255 - RNA, 42 nt, synthetic construct
  source 1..42: mol_type = other RNA
aacatgtatacctgggggaaagccagagtcgggggaccccat

SEQ ID NO: 22256 - RNA, 42 nt, synthetic construct
  source 1..42: mol_type = other RNA
aacatgtagacctgggggaaagccagagtcgggggaccccat

SEQ ID NO: 22257 - RNA, 42 nt, synthetic construct
  source 1..42: mol_type = other RNA
aacatgtaaacctgggggaaagccagagtcgggggaccccat

SEQ ID NO: 22258 - RNA, 43 nt, synthetic construct
  source 1..43: mol_type = other RNA
gaacatgtagacctgggggaaagccagagtcgggggaccccat

SEQ ID NO: 22259 - RNA, 43 nt, synthetic construct
  source 1..43: mol_type = other RNA
gaacatgtacacctgggggaaagccagagtcgggggaccccat

SEQ ID NO: 22260 - RNA, 43 nt, synthetic construct
  source 1..43: mol_type = other RNA
gaacatgtatacctgggggaaagccagagtcgggggaccccat

SEQ ID NO: 22261 - RNA, 43 nt, synthetic construct
  source 1..43: mol_type = other RNA
gaacatgtaaacctgggggaaagccagagtcgggggaccccat

SEQ ID NO: 22262 - RNA, 44 nt, synthetic construct
  source 1..44: mol_type = other RNA
ggaacatgtacacctgggggaaagccagagtcgggggaccccat

SEQ ID NO: 22263 - RNA, 44 nt, synthetic construct
  source 1..44: mol_type = other RNA
ggaacatgtaaacctgggggaaagccagagtcgggggaccccat

SEQ ID NO: 22264 - RNA, 44 nt, synthetic construct
  source 1..44: mol_type = other RNA
ggaacatgtagacctgggggaaagccagagtcgggggaccccat

SEQ ID NO: 22265 - RNA, 44 nt, synthetic construct
  source 1..44: mol_type = other RNA
ggaacatgtatacctgggggaaagccagagtcgggggaccccat

SEQ ID NO: 22266 - RNA, 45 nt, synthetic construct
  source 1..45: mol_type = other RNA
aggaacatgtagacctgggggaaagccagagtcgggggaccccat

SEQ ID NO: 22267 - RNA, 45 nt, synthetic construct
  source 1..45: mol_type = other RNA
aggaacatgtaaacctgggggaaagccagagtcgggggaccccat

SEQ ID NO: 22268 - RNA, 45 nt, synthetic construct
  source 1..45: mol_type = other RNA
aggaacatgtacacctgggggaaagccagagtcgggggaccccat

SEQ ID NO: 22269 - RNA, 45 nt, synthetic construct
  source 1..45: mol_type = other RNA
aggaacatgtatacctgggggaaagccagagtcgggggaccccat

SEQ ID NO: 22270 - RNA, 46 nt, synthetic construct
  source 1..46: mol_type = other RNA
caggaacatgtacacctgggggaaagccagagtcgggggaccccat

SEQ ID NO: 22271 - RNA, 46 nt, synthetic construct
  source 1..46: mol_type = other RNA
caggaacatgtaaacctgggggaaagccagagtcgggggaccccat

SEQ ID NO: 22272 - RNA, 46 nt, synthetic construct
  source 1..46: mol_type = other RNA
caggaacatgtagacctgggggaaagccagagtcgggggaccccat

SEQ ID NO: 22273 - RNA, 46 nt, synthetic construct
  source 1..46: mol_type = other RNA
caggaacatgtatacctgggggaaagccagagtcgggggaccccat

SEQ ID NO: 22274 - RNA, 47 nt, synthetic construct
  source 1..47: mol_type = other RNA
ccaggaacatgtaaacctgggggaaagccagagtcgggggaccccat

SEQ ID NO: 22275 - RNA, 47 nt, synthetic construct
  source 1..47: mol_type = other RNA
ccaggaacatgtatacctgggggaaagccagagtcgggggaccccat

SEQ ID NO: 22276 - RNA, 47 nt, synthetic construct
  source 1..47: mol_type = other RNA
ccaggaacatgtagacctgggggaaagccagagtcgggggaccccat

SEQ ID NO: 22277 - RNA, 47 nt, synthetic construct
  source 1..47: mol_type = other RNA
ccaggaacatgtacacctgggggaaagccagagtcgggggaccccat

SEQ ID NO: 22278 - RNA, 48 nt, synthetic construct
  source 1..48: mol_type = other RNA
accaggaacatgtacacctgggggaaagccagagtcgggggaccccat

SEQ ID NO: 22279 - RNA, 48 nt, synthetic construct
  source 1..48: mol_type = other RNA
accaggaacatgtatacctgggggaaagccagagtcgggggaccccat

SEQ ID NO: 22280 - RNA, 48 nt, synthetic construct
  source 1..48: mol_type = other RNA
accaggaacatgtagacctgggggaaagccagagtcgggggaccccat

SEQ ID NO: 22281 - RNA, 48 nt, synthetic construct
  source 1..48: mol_type = other RNA
accaggaacatgtaaacctgggggaaagccagagtcgggggaccccat

SEQ ID NO: 22282 - RNA, 49 nt, synthetic construct
  source 1..49: mol_type = other RNA
caccaggaacatgtaaacctgggggaaagccagagtcgggggaccccat

SEQ ID NO: 22283 - RNA, 49 nt, synthetic construct
  source 1..49: mol_type = other RNA
caccaggaacatgtagacctgggggaaagccagagtcgggggaccccat

SEQ ID NO: 22284 - RNA, 49 nt, synthetic construct
  source 1..49: mol_type = other RNA
caccaggaacatgtatacctgggggaaagccagagtcgggggaccccat

SEQ ID NO: 22285 - RNA, 49 nt, synthetic construct
  source 1..49: mol_type = other RNA
caccaggaacatgtacacctgggggaaagccagagtcgggggaccccat

SEQ ID NO: 22286 - RNA, 50 nt, synthetic construct
  source 1..50: mol_type = other RNA
tcaccaggaacatgtagacctgggggaaagccagagtcgggggaccccat

SEQ ID NO: 22287 - RNA, 50 nt, synthetic construct
  source 1..50: mol_type = other RNA
tcaccaggaacatgtatacctgggggaaagccagagtcgggggaccccat

SEQ ID NO: 22288 - RNA, 50 nt, synthetic construct
  source 1..50: mol_type = other RNA
tcaccaggaacatgtaaacctgggggaaagccagagtcgggggaccccat

SEQ ID NO: 22289 - RNA, 50 nt, synthetic construct
  source 1..50: mol_type = other RNA
tcaccaggaacatgtacacctgggggaaagccagagtcgggggaccccat

SEQ ID NO: 22290 - RNA, 51 nt, synthetic construct
  source 1..51: mol_type = other RNA
ttcaccaggaacatgtagacctgggggaaagccagagtcgggggaccccat

SEQ ID NO: 22291 - RNA, 51 nt, synthetic construct
  source 1..51: mol_type = other RNA
ttcaccaggaacatgtacacctgggggaaagccagagtcgggggaccccat

SEQ ID NO: 22292 - RNA, 51 nt, synthetic construct
  source 1..51: mol_type = other RNA
ttcaccaggaacatgtatacctgggggaaagccagagtcgggggaccccat

SEQ ID NO: 22293 - RNA, 51 nt, synthetic construct
  source 1..51: mol_type = other RNA
ttcaccaggaacatgtaaacctgggggaaagccagagtcgggggaccccat

SEQ ID NO: 22294 - RNA, 52 nt, synthetic construct
  source 1..52: mol_type = other RNA
tttcaccaggaacatgtatacctgggggaaagccagagtcgggggaccccat

SEQ ID NO: 22295 - RNA, 52 nt, synthetic construct
  source 1..52: mol_type = other RNA
tttcaccaggaacatgtacacctgggggaaagccagagtcgggggaccccat

SEQ ID NO: 22296 - RNA, 52 nt, synthetic construct
  source 1..52: mol_type = other RNA
tttcaccaggaacatgtaaacctgggggaaagccagagtcgggggaccccat

SEQ ID NO: 22297 - RNA, 52 nt, synthetic construct
  source 1..52: mol_type = other RNA
tttcaccaggaacatgtagacctgggggaaagccagagtcgggggaccccat

SEQ ID NO: 22298 - RNA, 53 nt, synthetic construct
  source 1..53: mol_type = other RNA
atttcaccaggaacatgtaaacctgggggaaagccagagtcgggggaccccat

SEQ ID NO: 22299 - RNA, 53 nt, synthetic construct
  source 1..53: mol_type = other RNA
atttcaccaggaacatgtatacctgggggaaagccagagtcgggggaccccat

SEQ ID NO: 22300 - RNA, 53 nt, synthetic construct
  source 1..53: mol_type = other RNA
atttcaccaggaacatgtacacctgggggaaagccagagtcgggggaccccat

SEQ ID NO: 22301 - RNA, 53 nt, synthetic construct
  source 1..53: mol_type = other RNA
atttcaccaggaacatgtagacctgggggaaagccagagtcgggggaccccat

SEQ ID NO: 22302 - RNA, 54 nt, synthetic construct
  source 1..54: mol_type = other RNA
catttcaccaggaacatgtagacctgggggaaagccagagtcgggggaccccat

SEQ ID NO: 22303 - RNA, 54 nt, synthetic construct
  source 1..54: mol_type = other RNA
catttcaccaggaacatgtatacctgggggaaagccagagtcgggggaccccat

SEQ ID NO: 22304 - RNA, 54 nt, synthetic construct
  source 1..54: mol_type = other RNA
catttcaccaggaacatgtaaacctgggggaaagccagagtcgggggaccccat

SEQ ID NO: 22305 - RNA, 54 nt, synthetic construct
  source 1..54: mol_type = other RNA
catttcaccaggaacatgtacacctgggggaaagccagagtcgggggaccccat

SEQ ID NO: 22306 - RNA, 55 nt, synthetic construct
  source 1..55: mol_type = other RNA
ccatttcaccaggaacatgtaaacctgggggaaagccagagtcgggggaccccat

SEQ ID NO: 22307 - RNA, 55 nt, synthetic construct
  source 1..55: mol_type = other RNA
ccatttcaccaggaacatgtacacctgggggaaagccagagtcgggggaccccat

SEQ ID NO: 22308 - RNA, 55 nt, synthetic construct
  source 1..55: mol_type = other RNA
ccatttcaccaggaacatgtagacctgggggaaagccagagtcgggggaccccat

SEQ ID NO: 22309 - RNA, 55 nt, synthetic construct
  source 1..55: mol_type = other RNA
ccatttcaccaggaacatgtatacctgggggaaagccagagtcgggggaccccat

SEQ ID NO: 22310 - RNA, 56 nt, synthetic construct
  source 1..56: mol_type = other RNA
gccatttcaccaggaacatgtaaacctgggggaaagccagagtcgggggaccccat

SEQ ID NO: 22311 - RNA, 56 nt, synthetic construct
  source 1..56: mol_type = other RNA
gccatttcaccaggaacatgtacacctgggggaaagccagagtcgggggaccccat

SEQ ID NO: 22312 - RNA, 56 nt, synthetic construct
  source 1..56: mol_type = other RNA
gccatttcaccaggaacatgtagacctgggggaaagccagagtcgggggaccccat

SEQ ID NO: 22313 - RNA, 56 nt, synthetic construct
  source 1..56: mol_type = other RNA
gccatttcaccaggaacatgtatacctgggggaaagccagagtcgggggaccccat

SEQ ID NO: 22314 - RNA, 57 nt, synthetic construct
  source 1..57: mol_type = other RNA
tgccatttcaccaggaacatgtaaacctgggggaaagccagagtcgggggaccccat

SEQ ID NO: 22315 - RNA, 57 nt, synthetic construct
  source 1..57: mol_type = other RNA
tgccatttcaccaggaacatgtatacctgggggaaagccagagtcgggggaccccat

SEQ ID NO: 22316 - RNA, 57 nt, synthetic construct
  source 1..57: mol_type = other RNA
tgccatttcaccaggaacatgtagacctgggggaaagccagagtcgggggaccccat

SEQ ID NO: 22317 - RNA, 57 nt, synthetic construct
  source 1..57: mol_type = other RNA
tgccatttcaccaggaacatgtacacctgggggaaagccagagtcgggggaccccat

SEQ ID NO: 22318 - RNA, 58 nt, synthetic construct
  source 1..58: mol_type = other RNA
ctgccatttcaccaggaacatgtagacctgggggaaagccagagtcgggggaccccat

SEQ ID NO: 22319 - RNA, 58 nt, synthetic construct
  source 1..58: mol_type = other RNA
ctgccatttcaccaggaacatgtaaacctgggggaaagccagagtcgggggaccccat

SEQ ID NO: 22320 - RNA, 58 nt, synthetic construct
  source 1..58: mol_type = other RNA
ctgccatttcaccaggaacatgtatacctgggggaaagccagagtcgggggaccccat

SEQ ID NO: 22321 - RNA, 58 nt, synthetic construct
  source 1..58: mol_type = other RNA
ctgccatttcaccaggaacatgtacacctgggggaaagccagagtcgggggaccccat

SEQ ID NO: 22322 - RNA, 59 nt, synthetic construct
  source 1..59: mol_type = other RNA
cctgccatttcaccaggaacatgtaaacctgggggaaagccagagtcgggggaccccat

SEQ ID NO: 22323 - RNA, 59 nt, synthetic construct
  source 1..59: mol_type = other RNA
cctgccatttcaccaggaacatgtacacctgggggaaagccagagtcgggggaccccat

SEQ ID NO: 22324 - RNA, 59 nt, synthetic construct
  source 1..59: mol_type = other RNA
cctgccatttcaccaggaacatgtatacctgggggaaagccagagtcgggggaccccat

SEQ ID NO: 22325 - RNA, 59 nt, synthetic construct
  source 1..59: mol_type = other RNA
cctgccatttcaccaggaacatgtagacctgggggaaagccagagtcgggggaccccat

SEQ ID NO: 22326 - RNA, 60 nt, synthetic construct
  source 1..60: mol_type = other RNA
tcctgccatttcaccaggaacatgtacacctgggggaaagccagagtcgggggaccccat

SEQ ID NO: 22327 - RNA, 60 nt, synthetic construct
  source 1..60: mol_type = other RNA
tcctgccatttcaccaggaacatgtaaacctgggggaaagccagagtcgggggaccccat

SEQ ID NO: 22328 - RNA, 60 nt, synthetic construct
  source 1..60: mol_type = other RNA
tcctgccatttcaccaggaacatgtatacctgggggaaagccagagtcgggggaccccat

SEQ ID NO: 22329 - RNA, 60 nt, synthetic construct
  source 1..60: mol_type = other RNA
tcctgccatttcaccaggaacatgtagacctgggggaaagccagagtcgggggaccccat

SEQ ID NO: 22330 - RNA, 61 nt, synthetic construct
  source 1..61: mol_type = other RNA
gtcctgccatttcaccaggaacatgtatacctgggggaaagccagagtcgggggaccccat

SEQ ID NO: 22331 - RNA, 61 nt, synthetic construct
  source 1..61: mol_type = other RNA
gtcctgccatttcaccaggaacatgtagacctgggggaaagccagagtcgggggaccccat

SEQ ID NO: 22332 - RNA, 61 nt, synthetic construct
  source 1..61: mol_type = other RNA
gtcctgccatttcaccaggaacatgtacacctgggggaaagccagagtcgggggaccccat

SEQ ID NO: 22333 - RNA, 61 nt, synthetic construct
  source 1..61: mol_type = other RNA
gtcctgccatttcaccaggaacatgtaaacctgggggaaagccagagtcgggggaccccat

SEQ ID NO: 22334 - RNA, 62 nt, synthetic construct
  source 1..62: mol_type = other RNA
ggtcctgccatttcaccaggaacatgtatacctgggggaaagccagagtcgggggaccccat

SEQ ID NO: 22335 - RNA, 62 nt, synthetic construct
  source 1..62: mol_type = other RNA
ggtcctgccatttcaccaggaacatgtaaacctgggggaaagccagagtcgggggaccccat

SEQ ID NO: 22336 - RNA, 62 nt, synthetic construct
  source 1..62: mol_type = other RNA
ggtcctgccatttcaccaggaacatgtagacctgggggaaagccagagtcgggggaccccat

SEQ ID NO: 22337 - RNA, 62 nt, synthetic construct
  source 1..62: mol_type = other RNA
ggtcctgccatttcaccaggaacatgtacacctgggggaaagccagagtcgggggaccccat

SEQ ID NO: 22338 - RNA, 63 nt, synthetic construct
  source 1..63: mol_type = other RNA
aggtcctgccatttcaccaggaacatgtacacctgggggaaagccagagtcgggggaccccat

SEQ ID NO: 22339 - RNA, 63 nt, synthetic construct
  source 1..63: mol_type = other RNA
aggtcctgccatttcaccaggaacatgtaaacctgggggaaagccagagtcgggggaccccat

SEQ ID NO: 22340 - RNA, 63 nt, synthetic construct
  source 1..63: mol_type = other RNA
aggtcctgccatttcaccaggaacatgtatacctgggggaaagccagagtcgggggaccccat

SEQ ID NO: 22341 - RNA, 63 nt, synthetic construct
  source 1..63: mol_type = other RNA
aggtcctgccatttcaccaggaacatgtagacctgggggaaagccagagtcgggggaccccat

SEQ ID NO: 22342 - RNA, 64 nt, synthetic construct
  source 1..64: mol_type = other RNA
caggtcctgccatttcaccaggaacatgtacacctgggggaaagccagagtcgggggaccccat

SEQ ID NO: 22343 - RNA, 64 nt, synthetic construct
  source 1..64: mol_type = other RNA
caggtcctgccatttcaccaggaacatgtaaacctgggggaaagccagagtcgggggaccccat

SEQ ID NO: 22344 - RNA, 64 nt, synthetic construct
  source 1..64: mol_type = other RNA
caggtcctgccatttcaccaggaacatgtatacctgggggaaagccagagtcgggggaccccat

SEQ ID NO: 22345 - RNA, 64 nt, synthetic construct
  source 1..64: mol_type = other RNA
caggtcctgccatttcaccaggaacatgtagacctgggggaaagccagagtcgggggaccccat

SEQ ID NO: 22346 - RNA, 65 nt, synthetic construct
  source 1..65: mol_type = other RNA
acaggtcctgccatttcaccaggaacatgtagacctgggggaaagccagagtcgggggaccccat

SEQ ID NO: 22347 - RNA, 65 nt, synthetic construct
  source 1..65: mol_type = other RNA
acaggtcctgccatttcaccaggaacatgtacacctgggggaaagccagagtcgggggaccccat

SEQ ID NO: 22348 - RNA, 65 nt, synthetic construct
  source 1..65: mol_type = other RNA
acaggtcctgccatttcaccaggaacatgtatacctgggggaaagccagagtcgggggaccccat

SEQ ID NO: 22349 - RNA, 65 nt, synthetic construct
  source 1..65: mol_type = other RNA
acaggtcctgccatttcaccaggaacatgtaaacctgggggaaagccagagtcgggggaccccat

SEQ ID NO: 22350 - RNA, 66 nt, synthetic construct
  source 1..66: mol_type = other RNA
gacaggtcctgccatttcaccaggaacatgtaaacctgggggaaagccagagtcgggggaccccat

SEQ ID NO: 22351 - RNA, 66 nt, synthetic construct
  source 1..66: mol_type = other RNA
gacaggtcctgccatttcaccaggaacatgtacacctgggggaaagccagagtcgggggaccccat

SEQ ID NO: 22352 - RNA, 66 nt, synthetic construct
  source 1..66: mol_type = other RNA
gacaggtcctgccatttcaccaggaacatgtagacctgggggaaagccagagtcgggggaccccat

SEQ ID NO: 22353 - RNA, 66 nt, synthetic construct
  source 1..66: mol_type = other RNA
gacaggtcctgccatttcaccaggaacatgtatacctgggggaaagccagagtcgggggaccccat

SEQ ID NO: 22354 - RNA, 67 nt, synthetic construct
  source 1..67: mol_type = other RNA
cgacaggtcctgccatttcaccaggaacatgtagacctgggggaaagccagagtcgggggaccccat

SEQ ID NO: 22355 - RNA, 67 nt, synthetic construct
  source 1..67: mol_type = other RNA
cgacaggtcctgccatttcaccaggaacatgtatacctgggggaaagccagagtcgggggaccccat

SEQ ID NO: 22356 - RNA, 67 nt, synthetic construct
  source 1..67: mol_type = other RNA
cgacaggtcctgccatttcaccaggaacatgtacacctgggggaaagccagagtcgggggaccccat

SEQ ID NO: 22357 - RNA, 67 nt, synthetic construct
  source 1..67: mol_type = other RNA
cgacaggtcctgccatttcaccaggaacatgtaaacctgggggaaagccagagtcgggggaccccat

SEQ ID NO: 22358 - RNA, 68 nt, synthetic construct
  source 1..68: mol_type = other RNA
ccgacaggtcctgccatttcaccaggaacatgtaaacctgggggaaagccagagtcgggggaccccat

SEQ ID NO: 22359 - RNA, 68 nt, synthetic construct
  source 1..68: mol_type = other RNA
ccgacaggtcctgccatttcaccaggaacatgtatacctgggggaaagccagagtcgggggaccccat

SEQ ID NO: 22360 - RNA, 68 nt, synthetic construct
  source 1..68: mol_type = other RNA
ccgacaggtcctgccatttcaccaggaacatgtagacctgggggaaagccagagtcgggggaccccat

SEQ ID NO: 22361 - RNA, 68 nt, synthetic construct
  source 1..68: mol_type = other RNA
ccgacaggtcctgccatttcaccaggaacatgtacacctgggggaaagccagagtcgggggaccccat

SEQ ID NO: 22362 - RNA, 69 nt, synthetic construct
  source 1..69: mol_type = other RNA
tccgacaggtcctgccatttcaccaggaacatgtaaacctgggggaaagccagagtcgggggaccccat

SEQ ID NO: 22363 - RNA, 69 nt, synthetic construct
  source 1..69: mol_type = other RNA
tccgacaggtcctgccatttcaccaggaacatgtatacctgggggaaagccagagtcgggggaccccat

SEQ ID NO: 22364 - RNA, 69 nt, synthetic construct
  source 1..69: mol_type = other RNA
tccgacaggtcctgccatttcaccaggaacatgtagacctgggggaaagccagagtcgggggaccccat

SEQ ID NO: 22365 - RNA, 69 nt, synthetic construct
  source 1..69: mol_type = other RNA
tccgacaggtcctgccatttcaccaggaacatgtacacctgggggaaagccagagtcgggggaccccat

SEQ ID NO: 22366 - RNA, 70 nt, synthetic construct
  source 1..70: mol_type = other RNA
ctccgacaggtcctgccatttcaccaggaacatgtatacctgggggaaagccagagtcgggggaccccat

SEQ ID NO: 22367 - RNA, 70 nt, synthetic construct
  source 1..70: mol_type = other RNA
ctccgacaggtcctgccatttcaccaggaacatgtacacctgggggaaagccagagtcgggggaccccat

SEQ ID NO: 22368 - RNA, 70 nt, synthetic construct
  source 1..70: mol_type = other RNA
ctccgacaggtcctgccatttcaccaggaacatgtaaacctgggggaaagccagagtcgggggaccccat

SEQ ID NO: 22369 - RNA, 70 nt, synthetic construct
  source 1..70: mol_type = other RNA
ctccgacaggtcctgccatttcaccaggaacatgtagacctgggggaaagccagagtcgggggaccccat

SEQ ID NO: 22370 - RNA, 71 nt, synthetic construct
  source 1..71: mol_type = other RNA
tctccgacaggtcctgccatttcaccaggaacatgtaaacctgggggaaagccagagtcgggggaccccat

SEQ ID NO: 22371 - RNA, 71 nt, synthetic construct
  source 1..71: mol_type = other RNA
tctccgacaggtcctgccatttcaccaggaacatgtagacctgggggaaagccagagtcgggggaccccat

SEQ ID NO: 22372 - RNA, 71 nt, synthetic construct
  source 1..71: mol_type = other RNA
tctccgacaggtcctgccatttcaccaggaacatgtacacctgggggaaagccagagtcgggggaccccat

SEQ ID NO: 22373 - RNA, 71 nt, synthetic construct
  source 1..71: mol_type = other RNA
tctccgacaggtcctgccatttcaccaggaacatgtatacctgggggaaagccagagtcgggggaccccat

SEQ ID NO: 22374 - RNA, 72 nt, synthetic construct
  source 1..72: mol_type = other RNA
ttctccgacaggtcctgccatttcaccaggaacatgtaaacctgggggaaagccagagtcgggggaccccat

SEQ ID NO: 22375 - RNA, 72 nt, synthetic construct
  source 1..72: mol_type = other RNA
ttctccgacaggtcctgccatttcaccaggaacatgtagacctgggggaaagccagagtcgggggaccccat

SEQ ID NO: 22376 - RNA, 72 nt, synthetic construct
  source 1..72: mol_type = other RNA
ttctccgacaggtcctgccatttcaccaggaacatgtatacctgggggaaagccagagtcgggggaccccat

SEQ ID NO: 22377 - RNA, 72 nt, synthetic construct
  source 1..72: mol_type = other RNA
ttctccgacaggtcctgccatttcaccaggaacatgtacacctgggggaaagccagagtcgggggaccccat

SEQ ID NO: 22378 - RNA, 73 nt, synthetic construct
  source 1..73: mol_type = other RNA
cttctccgacaggtcctgccatttcaccaggaacatgtagacctgggggaaagccagagtcgggggaccccat

SEQ ID NO: 22379 - RNA, 73 nt, synthetic construct
  source 1..73: mol_type = other RNA
cttctccgacaggtcctgccatttcaccaggaacatgtatacctgggggaaagccagagtcgggggaccccat

SEQ ID NO: 22380 - RNA, 73 nt, synthetic construct
  source 1..73: mol_type = other RNA
cttctccgacaggtcctgccatttcaccaggaacatgtacacctgggggaaagccagagtcgggggaccccat

SEQ ID NO: 22381 - RNA, 73 nt, synthetic construct
  source 1..73: mol_type = other RNA
cttctccgacaggtcctgccatttcaccaggaacatgtaaacctgggggaaagccagagtcgggggaccccat

SEQ ID NO: 22382 - RNA, 74 nt, synthetic construct
  source 1..74: mol_type = other RNA
ccttctccgacaggtcctgccatttcaccaggaacatgtagacctgggggaaagccagagtcgggggaccccat

SEQ ID NO: 22383 - RNA, 74 nt, synthetic construct
  source 1..74: mol_type = other RNA
ccttctccgacaggtcctgccatttcaccaggaacatgtacacctgggggaaagccagagtcgggggaccccat

SEQ ID NO: 22384 - RNA, 74 nt, synthetic construct
  source 1..74: mol_type = other RNA
ccttctccgacaggtcctgccatttcaccaggaacatgtatacctgggggaaagccagagtcgggggaccccat

SEQ ID NO: 22385 - RNA, 74 nt, synthetic construct
  source 1..74: mol_type = other RNA
ccttctccgacaggtcctgccatttcaccaggaacatgtaaacctgggggaaagccagagtcgggggaccccat

SEQ ID NO: 22386 - RNA, 75 nt, synthetic construct
  source 1..75: mol_type = other RNA
accttctccgacaggtcctgccatttcaccaggaacatgtacacctgggggaaagccagagtcgggggaccccat

SEQ ID NO: 22387 - RNA, 75 nt, synthetic construct
  source 1..75: mol_type = other RNA
accttctccgacaggtcctgccatttcaccaggaacatgtagacctgggggaaagccagagtcgggggaccccat

SEQ ID NO: 22388 - RNA, 75 nt, synthetic construct
  source 1..75: mol_type = other RNA
accttctccgacaggtcctgccatttcaccaggaacatgtaaacctgggggaaagccagagtcgggggaccccat

SEQ ID NO: 22389 - RNA, 75 nt, synthetic construct
  source 1..75: mol_type = other RNA
accttctccgacaggtcctgccatttcaccaggaacatgtatacctgggggaaagccagagtcgggggaccccat

SEQ ID NO: 22390 - RNA, 76 nt, synthetic construct
  source 1..76: mol_type = other RNA
caccttctccgacaggtcctgccatttcaccaggaacatgtatacctgggggaaagccagagtcgggggaccccat

SEQ ID NO: 22391 - RNA, 76 nt, synthetic construct
  source 1..76: mol_type = other RNA
caccttctccgacaggtcctgccatttcaccaggaacatgtaaacctgggggaaagccagagtcgggggaccccat

SEQ ID NO: 22392 - RNA, 76 nt, synthetic construct
  source 1..76: mol_type = other RNA
caccttctccgacaggtcctgccatttcaccaggaacatgtagacctgggggaaagccagagtcgggggaccccat

SEQ ID NO: 22393 - RNA, 76 nt, synthetic construct
  source 1..76: mol_type = other RNA
caccttctccgacaggtcctgccatttcaccaggaacatgtacacctgggggaaagccagagtcgggggaccccat

SEQ ID NO: 22394 - RNA, 77 nt, synthetic construct
  source 1..77: mol_type = other RNA
ccaccttctccgacaggtcctgccatttcaccaggaacatgtagacctgggggaaagccagagtcgggggaccccat

SEQ ID NO: 22395 - RNA, 77 nt, synthetic construct
  source 1..77: mol_type = other RNA
ccaccttctccgacaggtcctgccatttcaccaggaacatgtacacctgggggaaagccagagtcgggggaccccat

SEQ ID NO: 22396 - RNA, 77 nt, synthetic construct
  source 1..77: mol_type = other RNA
ccaccttctccgacaggtcctgccatttcaccaggaacatgtatacctgggggaaagccagagtcgggggaccccat

SEQ ID NO: 22397 - RNA, 77 nt, synthetic construct
  source 1..77: mol_type = other RNA
ccaccttctccgacaggtcctgccatttcaccaggaacatgtaaacctgggggaaagccagagtcgggggaccccat

SEQ ID NO: 22398 - RNA, 78 nt, synthetic construct
  source 1..78: mol_type = other RNA
accaccttctccgacaggtcctgccatttcaccaggaacatgtaaacctgggggaaagccagagtcgggggaccccat

SEQ ID NO: 22399 - RNA, 78 nt, synthetic construct
  source 1..78: mol_type = other RNA
accaccttctccgacaggtcctgccatttcaccaggaacatgtacacctgggggaaagccagagtcgggggaccccat

SEQ ID NO: 22400 - RNA, 78 nt, synthetic construct
  source 1..78: mol_type = other RNA
accaccttctccgacaggtcctgccatttcaccaggaacatgtagacctgggggaaagccagagtcgggggaccccat

SEQ ID NO: 22401 - RNA, 78 nt, synthetic construct
  source 1..78: mol_type = other RNA
accaccttctccgacaggtcctgccatttcaccaggaacatgtatacctgggggaaagccagagtcgggggaccccat

SEQ ID NO: 22402 - RNA, 79 nt, synthetic construct
  source 1..79: mol_type = other RNA
gaccaccttctccgacaggtcctgccatttcaccaggaacatgtatacctgggggaaagccagagtcgggggaccccat

SEQ ID NO: 22403 - RNA, 79 nt, synthetic construct
  source 1..79: mol_type = other RNA
gaccaccttctccgacaggtcctgccatttcaccaggaacatgtagacctgggggaaagccagagtcgggggaccccat

SEQ ID NO: 22404 - RNA, 79 nt, synthetic construct
  source 1..79: mol_type = other RNA
gaccaccttctccgacaggtcctgccatttcaccaggaacatgtacacctgggggaaagccagagtcgggggaccccat

SEQ ID NO: 22405 - RNA, 79 nt, synthetic construct
  source 1..79: mol_type = other RNA
gaccaccttctccgacaggtcctgccatttcaccaggaacatgtaaacctgggggaaagccagagtcgggggaccccat

SEQ ID NO: 22406 - RNA, 80 nt, synthetic construct
  source 1..80: mol_type = other RNA
agaccaccttctccgacaggtcctgccatttcaccaggaacatgtagacctgggggaaagccagagtcgggggaccccat

SEQ ID NO: 22407 - RNA, 80 nt, synthetic construct
  source 1..80: mol_type = other RNA
agaccaccttctccgacaggtcctgccatttcaccaggaacatgtacacctgggggaaagccagagtcgggggaccccat

SEQ ID NO: 22408 - RNA, 80 nt, synthetic construct
  source 1..80: mol_type = other RNA
agaccaccttctccgacaggtcctgccatttcaccaggaacatgtaaacctgggggaaagccagagtcgggggaccccat

SEQ ID NO: 22409 - RNA, 80 nt, synthetic construct
  source 1..80: mol_type = other RNA
agaccaccttctccgacaggtcctgccatttcaccaggaacatgtatacctgggggaaagccagagtcgggggaccccat

SEQ ID NO: 22410 - RNA, 81 nt, synthetic construct
  source 1..81: mol_type = other RNA
tagaccaccttctccgacaggtcctgccatttcaccaggaacatgtagacctgggggaaagccagagtcgggggaccccat

SEQ ID NO: 22411 - RNA, 81 nt, synthetic construct
  source 1..81: mol_type = other RNA
tagaccaccttctccgacaggtcctgccatttcaccaggaacatgtatacctgggggaaagccagagtcgggggaccccat

SEQ ID NO: 22412 - RNA, 81 nt, synthetic construct
  source 1..81: mol_type = other RNA
tagaccaccttctccgacaggtcctgccatttcaccaggaacatgtacacctgggggaaagccagagtcgggggaccccat

SEQ ID NO: 22413 - RNA, 81 nt, synthetic construct
  source 1..81: mol_type = other RNA
tagaccaccttctccgacaggtcctgccatttcaccaggaacatgtaaacctgggggaaagccagagtcgggggaccccat

SEQ ID NO: 22414 - RNA, 82 nt, synthetic construct
  source 1..82: mol_type = other RNA
gtagaccaccttctccgacaggtcctgccatttcaccaggaacatgtatacctgggggaaagccagagtcgggggaccccat

SEQ ID NO: 22415 - RNA, 82 nt, synthetic construct
  source 1..82: mol_type = other RNA
gtagaccaccttctccgacaggtcctgccatttcaccaggaacatgtagacctgggggaaagccagagtcgggggaccccat

SEQ ID NO: 22416 - RNA, 82 nt, synthetic construct
  source 1..82: mol_type = other RNA
gtagaccaccttctccgacaggtcctgccatttcaccaggaacatgtacacctgggggaaagccagagtcgggggaccccat

SEQ ID NO: 22417 - RNA, 82 nt, synthetic construct
  source 1..82: mol_type = other RNA
gtagaccaccttctccgacaggtcctgccatttcaccaggaacatgtaaacctgggggaaagccagagtcgggggaccccat

SEQ ID NO: 22418 - RNA, 83 nt, synthetic construct
  source 1..83: mol_type = other RNA
ggtagaccaccttctccgacaggtcctgccatttcaccaggaacatgtagacctgggggaaagccagagtcgggggaccccat

SEQ ID NO: 22419 - RNA, 83 nt, synthetic construct
  source 1..83: mol_type = other RNA
ggtagaccaccttctccgacaggtcctgccatttcaccaggaacatgtaaacctgggggaaagccagagtcgggggaccccat

SEQ ID NO: 22420 - RNA, 83 nt, synthetic construct
  source 1..83: mol_type = other RNA
ggtagaccaccttctccgacaggtcctgccatttcaccaggaacatgtatacctgggggaaagccagagtcgggggaccccat

SEQ ID NO: 22421 - RNA, 83 nt, synthetic construct
  source 1..83: mol_type = other RNA
ggtagaccaccttctccgacaggtcctgccatttcaccaggaacatgtacacctgggggaaagccagagtcgggggaccccat

SEQ ID NO: 22422 - RNA, 84 nt, synthetic construct
  source 1..84: mol_type = other RNA
cggtagaccaccttctccgacaggtcctgccatttcaccaggaacatgtagacctgggggaaagccagagtcgggggaccccat

SEQ ID NO: 22423 - RNA, 84 nt, synthetic construct
  source 1..84: mol_type = other RNA
cggtagaccaccttctccgacaggtcctgccatttcaccaggaacatgtaaacctgggggaaagccagagtcgggggaccccat

SEQ ID NO: 22424 - RNA, 84 nt, synthetic construct
  source 1..84: mol_type = other RNA
cggtagaccaccttctccgacaggtcctgccatttcaccaggaacatgtatacctgggggaaagccagagtcgggggaccccat

SEQ ID NO: 22425 - RNA, 84 nt, synthetic construct
  source 1..84: mol_type = other RNA
cggtagaccaccttctccgacaggtcctgccatttcaccaggaacatgtacacctgggggaaagccagagtcgggggaccccat

SEQ ID NO: 22426 - RNA, 85 nt, synthetic construct
  source 1..85: mol_type = other RNA
ccggtagaccaccttctccgacaggtcctgccatttcaccaggaacatgtacacctgggggaaagccagagtcgggggaccccat

SEQ ID NO: 22427 - RNA, 85 nt, synthetic construct
  source 1..85: mol_type = other RNA
ccggtagaccaccttctccgacaggtcctgccatttcaccaggaacatgtaaacctgggggaaagccagagtcgggggaccccat

SEQ ID NO: 22428 - RNA, 85 nt, synthetic construct
  source 1..85: mol_type = other RNA
ccggtagaccaccttctccgacaggtcctgccatttcaccaggaacatgtagacctgggggaaagccagagtcgggggaccccat

SEQ ID NO: 22429 - RNA, 85 nt, synthetic construct
  source 1..85: mol_type = other RNA
ccggtagaccaccttctccgacaggtcctgccatttcaccaggaacatgtatacctgggggaaagccagagtcgggggaccccat

SEQ ID NO: 22430 - RNA, 86 nt, synthetic construct
  source 1..86: mol_type = other RNA
gccggtagaccaccttctccgacaggtcctgccatttcaccaggaacatgtatacctgggggaaagccagagtcgggggaccccat

SEQ ID NO: 22431 - RNA, 86 nt, synthetic construct
  source 1..86: mol_type = other RNA
gccggtagaccaccttctccgacaggtcctgccatttcaccaggaacatgtagacctgggggaaagccagagtcgggggaccccat

SEQ ID NO: 22432 - RNA, 86 nt, synthetic construct
  source 1..86: mol_type = other RNA
gccggtagaccaccttctccgacaggtcctgccatttcaccaggaacatgtacacctgggggaaagccagagtcgggggaccccat

SEQ ID NO: 22433 - RNA, 86 nt, synthetic construct
  source 1..86: mol_type = other RNA
gccggtagaccaccttctccgacaggtcctgccatttcaccaggaacatgtaaacctgggggaaagccagagtcgggggaccccat

SEQ ID NO: 22434 - RNA, 87 nt, synthetic construct
  source 1..87: mol_type = other RNA
cgccggtagaccaccttctccgacaggtcctgccatttcaccaggaacatgtacacctgggggaaagccagagtcgggggaccccat

SEQ ID NO: 22435 - RNA, 87 nt, synthetic construct
  source 1..87: mol_type = other RNA
cgccggtagaccaccttctccgacaggtcctgccatttcaccaggaacatgtagacctgggggaaagccagagtcgggggaccccat

SEQ ID NO: 22436 - RNA, 87 nt, synthetic construct
  source 1..87: mol_type = other RNA
cgccggtagaccaccttctccgacaggtcctgccatttcaccaggaacatgtaaacctgggggaaagccagagtcgggggaccccat

SEQ ID NO: 22437 - RNA, 87 nt, synthetic construct
  source 1..87: mol_type = other RNA
cgccggtagaccaccttctccgacaggtcctgccatttcaccaggaacatgtatacctgggggaaagccagagtcgggggaccccat

SEQ ID NO: 22438 - RNA, 88 nt, synthetic construct
  source 1..88: mol_type = other RNA
gcgccggtagaccaccttctccgacaggtcctgccatttcaccaggaacatgtaaacctgggggaaagccagagtcgggggaccccat

SEQ ID NO: 22439 - RNA, 88 nt, synthetic construct
  source 1..88: mol_type = other RNA
gcgccggtagaccaccttctccgacaggtcctgccatttcaccaggaacatgtagacctgggggaaagccagagtcgggggaccccat

SEQ ID NO: 22440 - RNA, 88 nt, synthetic construct
  source 1..88: mol_type = other RNA
gcgccggtagaccaccttctccgacaggtcctgccatttcaccaggaacatgtatacctgggggaaagccagagtcgggggaccccat

SEQ ID NO: 22441 - RNA, 88 nt, synthetic construct
  source 1..88: mol_type = other RNA
gcgccggtagaccaccttctccgacaggtcctgccatttcaccaggaacatgtacacctgggggaaagccagagtcgggggaccccat

SEQ ID NO: 22442 - RNA, 89 nt, synthetic construct
  source 1..89: mol_type = other RNA
agcgccggtagaccaccttctccgacaggtcctgccatttcaccaggaacatgtaaacctgggggaaagccagagtcgggggaccccat

SEQ ID NO: 22443 - RNA, 89 nt, synthetic construct
  source 1..89: mol_type = other RNA
agcgccggtagaccaccttctccgacaggtcctgccatttcaccaggaacatgtatacctgggggaaagccagagtcgggggaccccat

SEQ ID NO: 22444 - RNA, 89 nt, synthetic construct
  source 1..89: mol_type = other RNA
agcgccggtagaccaccttctccgacaggtcctgccatttcaccaggaacatgtagacctgggggaaagccagagtcgggggaccccat

SEQ ID NO: 22445 - RNA, 89 nt, synthetic construct
  source 1..89: mol_type = other RNA
agcgccggtagaccaccttctccgacaggtcctgccatttcaccaggaacatgtacacctgggggaaagccagagtcgggggaccccat

SEQ ID NO: 22446 - RNA, 90 nt, synthetic construct
  source 1..90: mol_type = other RNA
aagcgccggtagaccaccttctccgacaggtcctgccatttcaccaggaacatgtagacctgggggaaagccagagtcgggggaccccat

SEQ ID NO: 22447 - RNA, 90 nt, synthetic construct
  source 1..90: mol_type = other RNA
aagcgccggtagaccaccttctccgacaggtcctgccatttcaccaggaacatgtacacctgggggaaagccagagtcgggggaccccat

SEQ ID NO: 22448 - RNA, 90 nt, synthetic construct
  source 1..90: mol_type = other RNA
aagcgccggtagaccaccttctccgacaggtcctgccatttcaccaggaacatgtaaacctgggggaaagccagagtcgggggaccccat

SEQ ID NO: 22449 - RNA, 90 nt, synthetic construct
  source 1..90: mol_type = other RNA
aagcgccggtagaccaccttctccgacaggtcctgccatttcaccaggaacatgtatacctgggggaaagccagagtcgggggaccccat

SEQ ID NO: 22450 - RNA, 91 nt, synthetic construct
  source 1..91: mol_type = other RNA
gaagcgccggtagaccaccttctccgacaggtcctgccatttcaccaggaacatgtatacctgggggaaagccagagtcgggggaccccat

SEQ ID NO: 22451 - RNA, 91 nt, synthetic construct
  source 1..91: mol_type = other RNA
gaagcgccggtagaccaccttctccgacaggtcctgccatttcaccaggaacatgtaaacctgggggaaagccagagtcgggggaccccat

SEQ ID NO: 22452 - RNA, 91 nt, synthetic construct
  source 1..91: mol_type = other RNA
gaagcgccggtagaccaccttctccgacaggtcctgccatttcaccaggaacatgtacacctgggggaaagccagagtcgggggaccccat

SEQ ID NO: 22453 - RNA, 91 nt, synthetic construct
  source 1..91: mol_type = other RNA
gaagcgccggtagaccaccttctccgacaggtcctgccatttcaccaggaacatgtagacctgggggaaagccagagtcgggggaccccat

SEQ ID NO: 22454 - RNA, 92 nt, synthetic construct
  source 1..92: mol_type = other RNA
tgaagcgccggtagaccaccttctccgacaggtcctgccatttcaccaggaacatgtagacctgggggaaagccagagtcgggggaccccat

SEQ ID NO: 22455 - RNA, 92 nt, synthetic construct
  source 1..92: mol_type = other RNA
tgaagcgccggtagaccaccttctccgacaggtcctgccatttcaccaggaacatgtatacctgggggaaagccagagtcgggggaccccat

SEQ ID NO: 22456 - RNA, 92 nt, synthetic construct
  source 1..92: mol_type = other RNA
tgaagcgccggtagaccaccttctccgacaggtcctgccatttcaccaggaacatgtacacctgggggaaagccagagtcgggggaccccat

SEQ ID NO: 22457 - RNA, 92 nt, synthetic construct
  source 1..92: mol_type = other RNA
tgaagcgccggtagaccaccttctccgacaggtcctgccatttcaccaggaacatgtaaacctgggggaaagccagagtcgggggaccccat

SEQ ID NO: 22458 - RNA, 93 nt, synthetic construct
  source 1..93: mol_type = other RNA
gtgaagcgccggtagaccaccttctccgacaggtcctgccatttcaccaggaacatgtagacctgggggaaagccagagtcgggggaccccat

SEQ ID NO: 22459 - RNA, 93 nt, synthetic construct
  source 1..93: mol_type = other RNA
gtgaagcgccggtagaccaccttctccgacaggtcctgccatttcaccaggaacatgtatacctgggggaaagccagagtcgggggaccccat

SEQ ID NO: 22460 - RNA, 93 nt, synthetic construct
  source 1..93: mol_type = other RNA
gtgaagcgccggtagaccaccttctccgacaggtcctgccatttcaccaggaacatgtaaacctgggggaaagccagagtcgggggaccccat

SEQ ID NO: 22461 - RNA, 93 nt, synthetic construct
  source 1..93: mol_type = other RNA
gtgaagcgccggtagaccaccttctccgacaggtcctgccatttcaccaggaacatgtacacctgggggaaagccagagtcgggggaccccat

SEQ ID NO: 22462 - RNA, 94 nt, synthetic construct
  source 1..94: mol_type = other RNA
ggtgaagcgccggtagaccaccttctccgacaggtcctgccatttcaccaggaacatgtagacctgggggaaagccagagtcgggggaccccat

SEQ ID NO: 22463 - RNA, 94 nt, synthetic construct
  source 1..94: mol_type = other RNA
ggtgaagcgccggtagaccaccttctccgacaggtcctgccatttcaccaggaacatgtacacctgggggaaagccagagtcgggggaccccat

SEQ ID NO: 22464 - RNA, 94 nt, synthetic construct
  source 1..94: mol_type = other RNA
ggtgaagcgccggtagaccaccttctccgacaggtcctgccatttcaccaggaacatgtaaacctgggggaaagccagagtcgggggaccccat

SEQ ID NO: 22465 - RNA, 94 nt, synthetic construct
  source 1..94: mol_type = other RNA
ggtgaagcgccggtagaccaccttctccgacaggtcctgccatttcaccaggaacatgtatacctgggggaaagccagagtcgggggaccccat

SEQ ID NO: 22466 - RNA, 95 nt, synthetic construct
  source 1..95: mol_type = other RNA
cggtgaagcgccggtagaccaccttctccgacaggtcctgccatttcaccaggaacatgtatacctgggggaaagccagagtcgggggaccccat

SEQ ID NO: 22467 - RNA, 95 nt, synthetic construct
  source 1..95: mol_type = other RNA
cggtgaagcgccggtagaccaccttctccgacaggtcctgccatttcaccaggaacatgtacacctgggggaaagccagagtcgggggaccccat

SEQ ID NO: 22468 - RNA, 95 nt, synthetic construct
  source 1..95: mol_type = other RNA
cggtgaagcgccggtagaccaccttctccgacaggtcctgccatttcaccaggaacatgtaaacctgggggaaagccagagtcgggggaccccat

SEQ ID NO: 22469 - RNA, 95 nt, synthetic construct
  source 1..95: mol_type = other RNA
cggtgaagcgccggtagaccaccttctccgacaggtcctgccatttcaccaggaacatgtagacctgggggaaagccagagtcgggggaccccat

SEQ ID NO: 22470 - RNA, 96 nt, synthetic construct
  source 1..96: mol_type = other RNA
tcggtgaagcgccggtagaccaccttctccgacaggtcctgccatttcaccaggaacatgtagacctgggggaaagccagagtcgggggaccccat

SEQ ID NO: 22471 - RNA, 96 nt, synthetic construct
  source 1..96: mol_type = other RNA
tcggtgaagcgccggtagaccaccttctccgacaggtcctgccatttcaccaggaacatgtacacctgggggaaagccagagtcgggggaccccat

SEQ ID NO: 22472 - RNA, 96 nt, synthetic construct
  source 1..96: mol_type = other RNA
tcggtgaagcgccggtagaccaccttctccgacaggtcctgccatttcaccaggaacatgtaaacctgggggaaagccagagtcgggggaccccat

SEQ ID NO: 22473 - RNA, 96 nt, synthetic construct
  source 1..96: mol_type = other RNA
tcggtgaagcgccggtagaccaccttctccgacaggtcctgccatttcaccaggaacatgtatacctgggggaaagccagagtcgggggaccccat

SEQ ID NO: 22474 - RNA, 97 nt, synthetic construct
  source 1..97: mol_type = other RNA
ctcggtgaagcgccggtagaccaccttctccgacaggtcctgccatttcaccaggaacatgtacacctgggggaaagccagagtcgggggaccccat

SEQ ID NO: 22475 - RNA, 97 nt, synthetic construct
  source 1..97: mol_type = other RNA
ctcggtgaagcgccggtagaccaccttctccgacaggtcctgccatttcaccaggaacatgtatacctgggggaaagccagagtcgggggaccccat

SEQ ID NO: 22476 - RNA, 97 nt, synthetic construct
  source 1..97: mol_type = other RNA
ctcggtgaagcgccggtagaccaccttctccgacaggtcctgccatttcaccaggaacatgtagacctgggggaaagccagagtcgggggaccccat

SEQ ID NO: 22477 - RNA, 97 nt, synthetic construct
  source 1..97: mol_type = other RNA
ctcggtgaagcgccggtagaccaccttctccgacaggtcctgccatttcaccaggaacatgtaaacctgggggaaagccagagtcgggggaccccat

SEQ ID NO: 22478 - RNA, 98 nt, synthetic construct
  source 1..98: mol_type = other RNA
tctcggtgaagcgccggtagaccaccttctccgacaggtcctgccatttcaccaggaacatgtaaacctgggggaaagccagagtcgggggaccccat

SEQ ID NO: 22479 - RNA, 98 nt, synthetic construct
  source 1..98: mol_type = other RNA
tctcggtgaagcgccggtagaccaccttctccgacaggtcctgccatttcaccaggaacatgtatacctgggggaaagccagagtcgggggaccccat

SEQ ID NO: 22480 - RNA, 98 nt, synthetic construct
  source 1..98: mol_type = other RNA
tctcggtgaagcgccggtagaccaccttctccgacaggtcctgccatttcaccaggaacatgtacacctgggggaaagccagagtcgggggaccccat

SEQ ID NO: 22481 - RNA, 98 nt, synthetic construct
  source 1..98: mol_type = other RNA
tctcggtgaagcgccggtagaccaccttctccgacaggtcctgccatttcaccaggaacatgtagacctgggggaaagccagagtcgggggaccccat

SEQ ID NO: 22482 - RNA, 99 nt, synthetic construct
  source 1..99: mol_type = other RNA
atctcggtgaagcgccggtagaccaccttctccgacaggtcctgccatttcaccaggaacatgtaaacctgggggaaagccagagtcgggggaccccat

SEQ ID NO: 22483 - RNA, 99 nt, synthetic construct
  source 1..99: mol_type = other RNA
atctcggtgaagcgccggtagaccaccttctccgacaggtcctgccatttcaccaggaacatgtacacctgggggaaagccagagtcgggggaccccat

SEQ ID NO: 22484 - RNA, 99 nt, synthetic construct
  source 1..99: mol_type = other RNA
atctcggtgaagcgccggtagaccaccttctccgacaggtcctgccatttcaccaggaacatgtagacctgggggaaagccagagtcgggggaccccat

SEQ ID NO: 22485 - RNA, 99 nt, synthetic construct
  source 1..99: mol_type = other RNA
atctcggtgaagcgccggtagaccaccttctccgacaggtcctgccatttcaccaggaacatgtatacctgggggaaagccagagtcgggggaccccat

SEQ ID NO: 22486 - RNA, 100 nt, synthetic construct
  source 1..100: mol_type = other RNA
gatctcggtgaagcgccggtagaccaccttctccgacaggtcctgccatttcaccaggaacatgtaaacctgggggaaagccagagtcgggggaccccat

SEQ ID NO: 22487 - RNA, 100 nt, synthetic construct
  source 1..100: mol_type = other RNA
gatctcggtgaagcgccggtagaccaccttctccgacaggtcctgccatttcaccaggaacatgtatacctgggggaaagccagagtcgggggaccccat

SEQ ID NO: 22488 - RNA, 100 nt, synthetic construct
  source 1..100: mol_type = other RNA
gatctcggtgaagcgccggtagaccaccttctccgacaggtcctgccatttcaccaggaacatgtacacctgggggaaagccagagtcgggggaccccat

SEQ ID NO: 22489 - RNA, 100 nt, synthetic construct
  source 1..100: mol_type = other RNA
gatctcggtgaagcgccggtagaccaccttctccgacaggtcctgccatttcaccaggaacatgtagacctgggggaaagccagagtcgggggaccccat

SEQ ID NO: 22490 - RNA, 101 nt, synthetic construct
  source 1..101: mol_type = other RNA
agatctcggtgaagcgccggtagaccaccttctccgacaggtcctgccatttcaccaggaacatgtacacctgggggaaagccagagtcgggggaccccat

SEQ ID NO: 22491 - RNA, 101 nt, synthetic construct
  source 1..101: mol_type = other RNA
agatctcggtgaagcgccggtagaccaccttctccgacaggtcctgccatttcaccaggaacatgtaaacctgggggaaagccagagtcgggggaccccat

SEQ ID NO: 22492 - RNA, 101 nt, synthetic construct
  source 1..101: mol_type = other RNA
agatctcggtgaagcgccggtagaccaccttctccgacaggtcctgccatttcaccaggaacatgtagacctgggggaaagccagagtcgggggaccccat

SEQ ID NO: 22493 - RNA, 101 nt, synthetic construct
  source 1..101: mol_type = other RNA
agatctcggtgaagcgccggtagaccaccttctccgacaggtcctgccatttcaccaggaacatgtatacctgggggaaagccagagtcgggggaccccat

SEQ ID NO: 22494 - RNA, 102 nt, synthetic construct
  source 1..102: mol_type = other RNA
tagatctcggtgaagcgccggtagaccaccttctccgacaggtcctgccatttcaccaggaacatgtatacctgggggaaagccagagtcgggggaccccat

SEQ ID NO: 22495 - RNA, 102 nt, synthetic construct
  source 1..102: mol_type = other RNA
tagatctcggtgaagcgccggtagaccaccttctccgacaggtcctgccatttcaccaggaacatgtagacctgggggaaagccagagtcgggggaccccat

SEQ ID NO: 22496 - RNA, 102 nt, synthetic construct
  source 1..102: mol_type = other RNA
tagatctcggtgaagcgccggtagaccaccttctccgacaggtcctgccatttcaccaggaacatgtacacctgggggaaagccagagtcgggggaccccat

SEQ ID NO: 22497 - RNA, 102 nt, synthetic construct
  source 1..102: mol_type = other RNA
tagatctcggtgaagcgccggtagaccaccttctccgacaggtcctgccatttcaccaggaacatgtaaacctgggggaaagccagagtcgggggaccccat

SEQ ID NO: 22498 - RNA, 103 nt, synthetic construct
  source 1..103: mol_type = other RNA
gtagatctcggtgaagcgccggtagaccaccttctccgacaggtcctgccatttcaccaggaacatgtacacctgggggaaagccagagtcgggggaccccat

SEQ ID NO: 22499 - RNA, 103 nt, synthetic construct
  source 1..103: mol_type = other RNA
gtagatctcggtgaagcgccggtagaccaccttctccgacaggtcctgccatttcaccaggaacatgtagacctgggggaaagccagagtcgggggaccccat

SEQ ID NO: 22500 - RNA, 103 nt, synthetic construct
  source 1..103: mol_type = other RNA
gtagatctcggtgaagcgccggtagaccaccttctccgacaggtcctgccatttcaccaggaacatgtatacctgggggaaagccagagtcgggggaccccat

SEQ ID NO: 22501 - RNA, 103 nt, synthetic construct
  source 1..103: mol_type = other RNA
gtagatctcggtgaagcgccggtagaccaccttctccgacaggtcctgccatttcaccaggaacatgtaaacctgggggaaagccagagtcgggggaccccat

SEQ ID NO: 22502 - RNA, 16 nt, synthetic construct
  source 1..16: mol_type = other RNA
tggggtcccccgactc

SEQ ID NO: 22503 - RNA, 17 nt, synthetic construct
  source 1..17: mol_type = other RNA
atggggtcccccgactc

SEQ ID NO: 22504 - RNA, 18 nt, synthetic construct
  source 1..18: mol_type = other RNA
aatggggtcccccgactc

SEQ ID NO: 22505 - RNA, 19 nt, synthetic construct
  source 1..19: mol_type = other RNA
gaatggggtcccccgactc

SEQ ID NO: 22506 - RNA, 20 nt, synthetic construct
  source 1..20: mol_type = other RNA
tgaatggggtcccccgactc

SEQ ID NO: 22507 - RNA, 21 nt, synthetic construct
  source 1..21: mol_type = other RNA
ctgaatggggtcccccgactc

SEQ ID NO: 22508 - RNA, 22 nt, synthetic construct
  source 1..22: mol_type = other RNA
gctgaatggggtcccccgactc

SEQ ID NO: 22509-22515 - skipped (7 entries)

SEQ ID NO: 22516 - RNA, 10 nt, synthetic construct
  source 1..10: mol_type = other RNA
tcgggggacc

SEQ ID NO: 22517 - RNA, 11 nt, synthetic construct
  source 1..11: mol_type = other RNA
tcgggggaccc

SEQ ID NO: 22518 - RNA, 12 nt, synthetic construct
  source 1..12: mol_type = other RNA
tcgggggacccc

SEQ ID NO: 22519 - RNA, 13 nt, synthetic construct
  source 1..13: mol_type = other RNA
tcgggggacccca

SEQ ID NO: 22520 - RNA, 14 nt, synthetic construct
  source 1..14: mol_type = other RNA
tcgggggaccccat

SEQ ID NO: 22521 - RNA, 15 nt, synthetic construct
  source 1..15: mol_type = other RNA
tcgggggaccccatt

SEQ ID NO: 22522 - RNA, 16 nt, synthetic construct
  source 1..16: mol_type = other RNA
tcgggggaccccattc

SEQ ID NO: 22523 - RNA, 17 nt, synthetic construct
  source 1..17: mol_type = other RNA
tcgggggaccccattca

SEQ ID NO: 22524 - RNA, 18 nt, synthetic construct
  source 1..18: mol_type = other RNA
tcgggggaccccattcag

SEQ ID NO: 22525 - RNA, 19 nt, synthetic construct
  source 1..19: mol_type = other RNA
tcgggggaccccattcagc

SEQ ID NO: 22526 - RNA, 19 nt, synthetic construct
  source 1..19: mol_type = other RNA
acctgggggaaagccagag

SEQ ID NO: 22527 - RNA, 20 nt, synthetic construct
  source 1..20: mol_type = other RNA
aacctgggggaaagccagag

SEQ ID NO: 22528 - RNA, 20 nt, synthetic construct
  source 1..20: mol_type = other RNA
gacctgggggaaagccagag

SEQ ID NO: 22529 - RNA, 20 nt, synthetic construct
  source 1..20: mol_type = other RNA
cacctgggggaaagccagag

SEQ ID NO: 22530 - RNA, 20 nt, synthetic construct
  source 1..20: mol_type = other RNA
tacctgggggaaagccagag

SEQ ID NO: 22531 - RNA, 21 nt, synthetic construct
  source 1..21: mol_type = other RNA
aaacctgggggaaagccagag

SEQ ID NO: 22532 - RNA, 21 nt, synthetic construct
  source 1..21: mol_type = other RNA
acacctgggggaaagccagag

SEQ ID NO: 22533 - RNA, 21 nt, synthetic construct
  source 1..21: mol_type = other RNA
agacctgggggaaagccagag

SEQ ID NO: 22534 - RNA, 21 nt, synthetic construct
  source 1..21: mol_type = other RNA
atacctgggggaaagccagag

SEQ ID NO: 22535 - RNA, 22 nt, synthetic construct
  source 1..22: mol_type = other RNA
tatacctgggggaaagccagag

SEQ ID NO: 22536 - RNA, 22 nt, synthetic construct
  source 1..22: mol_type = other RNA
taaacctgggggaaagccagag

SEQ ID NO: 22537 - RNA, 22 nt, synthetic construct
  source 1..22: mol_type = other RNA
tacacctgggggaaagccagag

SEQ ID NO: 22538 - RNA, 22 nt, synthetic construct
  source 1..22: mol_type = other RNA
tagacctgggggaaagccagag

SEQ ID NO: 22539 - RNA, 23 nt, synthetic construct
  source 1..23: mol_type = other RNA
gtagacctgggggaaagccagag

SEQ ID NO: 22540 - RNA, 23 nt, synthetic construct
  source 1..23: mol_type = other RNA
gtaaacctgggggaaagccagag

SEQ ID NO: 22541 - RNA, 23 nt, synthetic construct
  source 1..23: mol_type = other RNA
gtatacctgggggaaagccagag

SEQ ID NO: 22542 - RNA, 23 nt, synthetic construct
  source 1..23: mol_type = other RNA
gtacacctgggggaaagccagag

SEQ ID NO: 22543 - RNA, 24 nt, synthetic construct
  source 1..24: mol_type = other RNA
tgtatacctgggggaaagccagag

SEQ ID NO: 22544 - RNA, 24 nt, synthetic construct
  source 1..24: mol_type = other RNA
tgtagacctgggggaaagccagag

SEQ ID NO: 22545 - RNA, 24 nt, synthetic construct
  source 1..24: mol_type = other RNA
tgtacacctgggggaaagccagag

SEQ ID NO: 22546 - RNA, 24 nt, synthetic construct
  source 1..24: mol_type = other RNA
tgtaaacctgggggaaagccagag

SEQ ID NO: 22547 - RNA, 25 nt, synthetic construct
  source 1..25: mol_type = other RNA
atgtagacctgggggaaagccagag

SEQ ID NO: 22548 - RNA, 25 nt, synthetic construct
  source 1..25: mol_type = other RNA
atgtaaacctgggggaaagccagag

SEQ ID NO: 22549 - RNA, 25 nt, synthetic construct
  source 1..25: mol_type = other RNA
atgtacacctgggggaaagccagag

SEQ ID NO: 22550 - RNA, 25 nt, synthetic construct
  source 1..25: mol_type = other RNA
atgtatacctgggggaaagccagag

SEQ ID NO: 22551 - RNA, 26 nt, synthetic construct
  source 1..26: mol_type = other RNA
catgtagacctgggggaaagccagag

SEQ ID NO: 22552 - RNA, 26 nt, synthetic construct
  source 1..26: mol_type = other RNA
catgtatacctgggggaaagccagag

SEQ ID NO: 22553 - RNA, 26 nt, synthetic construct
  source 1..26: mol_type = other RNA
catgtaaacctgggggaaagccagag

SEQ ID NO: 22554 - RNA, 26 nt, synthetic construct
  source 1..26: mol_type = other RNA
catgtacacctgggggaaagccagag

SEQ ID NO: 22555 - RNA, 27 nt, synthetic construct
  source 1..27: mol_type = other RNA
acatgtatacctgggggaaagccagag

SEQ ID NO: 22556 - RNA, 27 nt, synthetic construct
  source 1..27: mol_type = other RNA
acatgtaaacctgggggaaagccagag

SEQ ID NO: 22557 - RNA, 27 nt, synthetic construct
  source 1..27: mol_type = other RNA
acatgtacacctgggggaaagccagag

SEQ ID NO: 22558 - RNA, 27 nt, synthetic construct
  source 1..27: mol_type = other RNA
acatgtagacctgggggaaagccagag

SEQ ID NO: 22559 - RNA, 28 nt, synthetic construct
  source 1..28: mol_type = other RNA
aacatgtagacctgggggaaagccagag

SEQ ID NO: 22560 - RNA, 28 nt, synthetic construct
  source 1..28: mol_type = other RNA
aacatgtatacctgggggaaagccagag

SEQ ID NO: 22561 - RNA, 28 nt, synthetic construct
  source 1..28: mol_type = other RNA
aacatgtaaacctgggggaaagccagag

SEQ ID NO: 22562 - RNA, 28 nt, synthetic construct
  source 1..28: mol_type = other RNA
aacatgtacacctgggggaaagccagag

SEQ ID NO: 22563 - RNA, 29 nt, synthetic construct
  source 1..29: mol_type = other RNA
gaacatgtagacctgggggaaagccagag

SEQ ID NO: 22564 - RNA, 29 nt, synthetic construct
  source 1..29: mol_type = other RNA
gaacatgtaaacctgggggaaagccagag

SEQ ID NO: 22565 - RNA, 29 nt, synthetic construct
  source 1..29: mol_type = other RNA
gaacatgtacacctgggggaaagccagag

SEQ ID NO: 22566 - RNA, 29 nt, synthetic construct
  source 1..29: mol_type = other RNA
gaacatgtatacctgggggaaagccagag

SEQ ID NO: 22567 - RNA, 30 nt, synthetic construct
  source 1..30: mol_type = other RNA
ggaacatgtaaacctgggggaaagccagag

SEQ ID NO: 22568 - RNA, 30 nt, synthetic construct
  source 1..30: mol_type = other RNA
ggaacatgtacacctgggggaaagccagag

SEQ ID NO: 22569 - RNA, 30 nt, synthetic construct
  source 1..30: mol_type = other RNA
ggaacatgtagacctgggggaaagccagag

SEQ ID NO: 22570 - RNA, 30 nt, synthetic construct
  source 1..30: mol_type = other RNA
ggaacatgtatacctgggggaaagccagag

SEQ ID NO: 22571 - RNA, 31 nt, synthetic construct
  source 1..31: mol_type = other RNA
aggaacatgtacacctgggggaaagccagag

SEQ ID NO: 22572 - RNA, 31 nt, synthetic construct
  source 1..31: mol_type = other RNA
aggaacatgtatacctgggggaaagccagag

SEQ ID NO: 22573 - RNA, 31 nt, synthetic construct
  source 1..31: mol_type = other RNA
aggaacatgtagacctgggggaaagccagag

SEQ ID NO: 22574 - RNA, 31 nt, synthetic construct
  source 1..31: mol_type = other RNA
aggaacatgtaaacctgggggaaagccagag

SEQ ID NO: 22575 - RNA, 32 nt, synthetic construct
  source 1..32: mol_type = other RNA
caggaacatgtacacctgggggaaagccagag

SEQ ID NO: 22576 - RNA, 32 nt, synthetic construct
  source 1..32: mol_type = other RNA
caggaacatgtagacctgggggaaagccagag

SEQ ID NO: 22577 - RNA, 32 nt, synthetic construct
  source 1..32: mol_type = other RNA
caggaacatgtatacctgggggaaagccagag

SEQ ID NO: 22578 - RNA, 32 nt, synthetic construct
  source 1..32: mol_type = other RNA
caggaacatgtaaacctgggggaaagccagag

SEQ ID NO: 22579 - RNA, 33 nt, synthetic construct
  source 1..33: mol_type = other RNA
ccaggaacatgtaaacctgggggaaagccagag

SEQ ID NO: 22580 - RNA, 33 nt, synthetic construct
  source 1..33: mol_type = other RNA
ccaggaacatgtagacctgggggaaagccagag

SEQ ID NO: 22581 - RNA, 33 nt, synthetic construct
  source 1..33: mol_type = other RNA
ccaggaacatgtatacctgggggaaagccagag

SEQ ID NO: 22582 - RNA, 33 nt, synthetic construct
  source 1..33: mol_type = other RNA
ccaggaacatgtacacctgggggaaagccagag

SEQ ID NO: 22583 - RNA, 34 nt, synthetic construct
  source 1..34: mol_type = other RNA
accaggaacatgtagacctgggggaaagccagag

SEQ ID NO: 22584 - RNA, 34 nt, synthetic construct
  source 1..34: mol_type = other RNA
accaggaacatgtacacctgggggaaagccagag

SEQ ID NO: 22585 - RNA, 34 nt, synthetic construct
  source 1..34: mol_type = other RNA
accaggaacatgtatacctgggggaaagccagag

SEQ ID NO: 22586 - RNA, 34 nt, synthetic construct
  source 1..34: mol_type = other RNA
accaggaacatgtaaacctgggggaaagccagag

SEQ ID NO: 22587 - RNA, 35 nt, synthetic construct
  source 1..35: mol_type = other RNA
caccaggaacatgtaaacctgggggaaagccagag

SEQ ID NO: 22588 - RNA, 35 nt, synthetic construct
  source 1..35: mol_type = other RNA
caccaggaacatgtatacctgggggaaagccagag

SEQ ID NO: 22589 - RNA, 35 nt, synthetic construct
  source 1..35: mol_type = other RNA
caccaggaacatgtagacctgggggaaagccagag

SEQ ID NO: 22590 - RNA, 35 nt, synthetic construct
  source 1..35: mol_type = other RNA
caccaggaacatgtacacctgggggaaagccagag

SEQ ID NO: 22591 - RNA, 36 nt, synthetic construct
  source 1..36: mol_type = other RNA
tcaccaggaacatgtacacctgggggaaagccagag

SEQ ID NO: 22592 - RNA, 36 nt, synthetic construct
  source 1..36: mol_type = other RNA
tcaccaggaacatgtagacctgggggaaagccagag

SEQ ID NO: 22593 - RNA, 36 nt, synthetic construct
  source 1..36: mol_type = other RNA
tcaccaggaacatgtatacctgggggaaagccagag

SEQ ID NO: 22594 - RNA, 36 nt, synthetic construct
  source 1..36: mol_type = other RNA
tcaccaggaacatgtaaacctgggggaaagccagag

SEQ ID NO: 22595 - RNA, 37 nt, synthetic construct
  source 1..37: mol_type = other RNA
ttcaccaggaacatgtacacctgggggaaagccagag

SEQ ID NO: 22596 - RNA, 37 nt, synthetic construct
  source 1..37: mol_type = other RNA
ttcaccaggaacatgtaaacctgggggaaagccagag

SEQ ID NO: 22597 - RNA, 37 nt, synthetic construct
  source 1..37: mol_type = other RNA
ttcaccaggaacatgtatacctgggggaaagccagag

SEQ ID NO: 22598 - RNA, 37 nt, synthetic construct
  source 1..37: mol_type = other RNA
ttcaccaggaacatgtagacctgggggaaagccagag

SEQ ID NO: 22599 - RNA, 38 nt, synthetic construct
  source 1..38: mol_type = other RNA
tttcaccaggaacatgtaaacctgggggaaagccagag

SEQ ID NO: 22600 - RNA, 38 nt, synthetic construct
  source 1..38: mol_type = other RNA
tttcaccaggaacatgtagacctgggggaaagccagag

SEQ ID NO: 22601 - RNA, 38 nt, synthetic construct
  source 1..38: mol_type = other RNA
tttcaccaggaacatgtatacctgggggaaagccagag

SEQ ID NO: 22602 - RNA, 38 nt, synthetic construct
  source 1..38: mol_type = other RNA
tttcaccaggaacatgtacacctgggggaaagccagag

SEQ ID NO: 22603 - RNA, 39 nt, synthetic construct
  source 1..39: mol_type = other RNA
atttcaccaggaacatgtacacctgggggaaagccagag

SEQ ID NO: 22604 - RNA, 39 nt, synthetic construct
  source 1..39: mol_type = other RNA
atttcaccaggaacatgtagacctgggggaaagccagag

SEQ ID NO: 22605 - RNA, 39 nt, synthetic construct
  source 1..39: mol_type = other RNA
atttcaccaggaacatgtatacctgggggaaagccagag

SEQ ID NO: 22606 - RNA, 39 nt, synthetic construct
  source 1..39: mol_type = other RNA
atttcaccaggaacatgtaaacctgggggaaagccagag

SEQ ID NO: 22607 - RNA, 40 nt, synthetic construct
  source 1..40: mol_type = other RNA
catttcaccaggaacatgtatacctgggggaaagccagag

SEQ ID NO: 22608 - RNA, 40 nt, synthetic construct
  source 1..40: mol_type = other RNA
catttcaccaggaacatgtaaacctgggggaaagccagag

SEQ ID NO: 22609 - RNA, 40 nt, synthetic construct
  source 1..40: mol_type = other RNA
catttcaccaggaacatgtagacctgggggaaagccagag

SEQ ID NO: 22610 - RNA, 40 nt, synthetic construct
  source 1..40: mol_type = other RNA
catttcaccaggaacatgtacacctgggggaaagccagag

SEQ ID NO: 22611 - RNA, 41 nt, synthetic construct
  source 1..41: mol_type = other RNA
ccatttcaccaggaacatgtaaacctgggggaaagccagag

SEQ ID NO: 22612 - RNA, 41 nt, synthetic construct
  source 1..41: mol_type = other RNA
ccatttcaccaggaacatgtacacctgggggaaagccagag

SEQ ID NO: 22613 - RNA, 41 nt, synthetic construct
  source 1..41: mol_type = other RNA
ccatttcaccaggaacatgtagacctgggggaaagccagag

SEQ ID NO: 22614 - RNA, 41 nt, synthetic construct
  source 1..41: mol_type = other RNA
ccatttcaccaggaacatgtatacctgggggaaagccagag

SEQ ID NO: 22615 - RNA, 42 nt, synthetic construct
  source 1..42: mol_type = other RNA
gccatttcaccaggaacatgtatacctgggggaaagccagag

SEQ ID NO: 22616 - RNA, 42 nt, synthetic construct
  source 1..42: mol_type = other RNA
gccatttcaccaggaacatgtagacctgggggaaagccagag

SEQ ID NO: 22617 - RNA, 42 nt, synthetic construct
  source 1..42: mol_type = other RNA
gccatttcaccaggaacatgtacacctgggggaaagccagag

SEQ ID NO: 22618 - RNA, 42 nt, synthetic construct
  source 1..42: mol_type = other RNA
gccatttcaccaggaacatgtaaacctgggggaaagccagag

SEQ ID NO: 22619 - RNA, 43 nt, synthetic construct
  source 1..43: mol_type = other RNA
tgccatttcaccaggaacatgtatacctgggggaaagccagag

SEQ ID NO: 22620 - RNA, 43 nt, synthetic construct
  source 1..43: mol_type = other RNA
tgccatttcaccaggaacatgtacacctgggggaaagccagag

SEQ ID NO: 22621 - RNA, 43 nt, synthetic construct
  source 1..43: mol_type = other RNA
tgccatttcaccaggaacatgtaaacctgggggaaagccagag

SEQ ID NO: 22622 - RNA, 43 nt, synthetic construct
  source 1..43: mol_type = other RNA
tgccatttcaccaggaacatgtagacctgggggaaagccagag

SEQ ID NO: 22623 - RNA, 44 nt, synthetic construct
  source 1..44: mol_type = other RNA
ctgccatttcaccaggaacatgtacacctgggggaaagccagag

SEQ ID NO: 22624 - RNA, 44 nt, synthetic construct
  source 1..44: mol_type = other RNA
ctgccatttcaccaggaacatgtatacctgggggaaagccagag

SEQ ID NO: 22625 - RNA, 44 nt, synthetic construct
  source 1..44: mol_type = other RNA
ctgccatttcaccaggaacatgtagacctgggggaaagccagag

SEQ ID NO: 22626 - RNA, 44 nt, synthetic construct
  source 1..44: mol_type = other RNA
ctgccatttcaccaggaacatgtaaacctgggggaaagccagag

SEQ ID NO: 22627 - RNA, 45 nt, synthetic construct
  source 1..45: mol_type = other RNA
cctgccatttcaccaggaacatgtaaacctgggggaaagccagag

SEQ ID NO: 22628 - RNA, 45 nt, synthetic construct
  source 1..45: mol_type = other RNA
cctgccatttcaccaggaacatgtacacctgggggaaagccagag

SEQ ID NO: 22629 - RNA, 45 nt, synthetic construct
  source 1..45: mol_type = other RNA
cctgccatttcaccaggaacatgtatacctgggggaaagccagag

SEQ ID NO: 22630 - RNA, 45 nt, synthetic construct
  source 1..45: mol_type = other RNA
cctgccatttcaccaggaacatgtagacctgggggaaagccagag

SEQ ID NO: 22631 - RNA, 46 nt, synthetic construct
  source 1..46: mol_type = other RNA
tcctgccatttcaccaggaacatgtacacctgggggaaagccagag

SEQ ID NO: 22632 - RNA, 46 nt, synthetic construct
  source 1..46: mol_type = other RNA
tcctgccatttcaccaggaacatgtagacctgggggaaagccagag

SEQ ID NO: 22633 - RNA, 46 nt, synthetic construct
  source 1..46: mol_type = other RNA
tcctgccatttcaccaggaacatgtaaacctgggggaaagccagag

SEQ ID NO: 22634 - RNA, 46 nt, synthetic construct
  source 1..46: mol_type = other RNA
tcctgccatttcaccaggaacatgtatacctgggggaaagccagag

SEQ ID NO: 22635 - RNA, 47 nt, synthetic construct
  source 1..47: mol_type = other RNA
gtcctgccatttcaccaggaacatgtaaacctgggggaaagccagag

SEQ ID NO: 22636 - RNA, 47 nt, synthetic construct
  source 1..47: mol_type = other RNA
gtcctgccatttcaccaggaacatgtatacctgggggaaagccagag

SEQ ID NO: 22637 - RNA, 47 nt, synthetic construct
  source 1..47: mol_type = other RNA
gtcctgccatttcaccaggaacatgtagacctgggggaaagccagag

SEQ ID NO: 22638 - RNA, 47 nt, synthetic construct
  source 1..47: mol_type = other RNA
gtcctgccatttcaccaggaacatgtacacctgggggaaagccagag

SEQ ID NO: 22639 - RNA, 48 nt, synthetic construct
  source 1..48: mol_type = other RNA
ggtcctgccatttcaccaggaacatgtacacctgggggaaagccagag

SEQ ID NO: 22640 - RNA, 48 nt, synthetic construct
  source 1..48: mol_type = other RNA
ggtcctgccatttcaccaggaacatgtagacctgggggaaagccagag

SEQ ID NO: 22641 - RNA, 48 nt, synthetic construct
  source 1..48: mol_type = other RNA
ggtcctgccatttcaccaggaacatgtaaacctgggggaaagccagag

SEQ ID NO: 22642 - RNA, 48 nt, synthetic construct
  source 1..48: mol_type = other RNA
ggtcctgccatttcaccaggaacatgtatacctgggggaaagccagag

SEQ ID NO: 22643 - RNA, 49 nt, synthetic construct
  source 1..49: mol_type = other RNA
aggtcctgccatttcaccaggaacatgtacacctgggggaaagccagag

SEQ ID NO: 22644 - RNA, 49 nt, synthetic construct
  source 1..49: mol_type = other RNA
aggtcctgccatttcaccaggaacatgtagacctgggggaaagccagag

SEQ ID NO: 22645 - RNA, 49 nt, synthetic construct
  source 1..49: mol_type = other RNA
aggtcctgccatttcaccaggaacatgtaaacctgggggaaagccagag

SEQ ID NO: 22646 - RNA, 49 nt, synthetic construct
  source 1..49: mol_type = other RNA
aggtcctgccatttcaccaggaacatgtatacctgggggaaagccagag

SEQ ID NO: 22647 - RNA, 50 nt, synthetic construct
  source 1..50: mol_type = other RNA
caggtcctgccatttcaccaggaacatgtaaacctgggggaaagccagag

SEQ ID NO: 22648 - RNA, 50 nt, synthetic construct
  source 1..50: mol_type = other RNA
caggtcctgccatttcaccaggaacatgtacacctgggggaaagccagag

SEQ ID NO: 22649 - RNA, 50 nt, synthetic construct
  source 1..50: mol_type = other RNA
caggtcctgccatttcaccaggaacatgtagacctgggggaaagccagag

SEQ ID NO: 22650 - RNA, 50 nt, synthetic construct
  source 1..50: mol_type = other RNA
caggtcctgccatttcaccaggaacatgtatacctgggggaaagccagag

SEQ ID NO: 22651 - RNA, 51 nt, synthetic construct
  source 1..51: mol_type = other RNA
acaggtcctgccatttcaccaggaacatgtagacctgggggaaagccagag

SEQ ID NO: 22652 - RNA, 51 nt, synthetic construct
  source 1..51: mol_type = other RNA
acaggtcctgccatttcaccaggaacatgtatacctgggggaaagccagag

SEQ ID NO: 22653 - RNA, 51 nt, synthetic construct
  source 1..51: mol_type = other RNA
acaggtcctgccatttcaccaggaacatgtaaacctgggggaaagccagag

SEQ ID NO: 22654 - RNA, 51 nt, synthetic construct
  source 1..51: mol_type = other RNA
acaggtcctgccatttcaccaggaacatgtacacctgggggaaagccagag

SEQ ID NO: 22655 - RNA, 52 nt, synthetic construct
  source 1..52: mol_type = other RNA
gacaggtcctgccatttcaccaggaacatgtacacctgggggaaagccagag

SEQ ID NO: 22656 - RNA, 52 nt, synthetic construct
  source 1..52: mol_type = other RNA
gacaggtcctgccatttcaccaggaacatgtaaacctgggggaaagccagag

SEQ ID NO: 22657 - RNA, 52 nt, synthetic construct
  source 1..52: mol_type = other RNA
gacaggtcctgccatttcaccaggaacatgtatacctgggggaaagccagag

SEQ ID NO: 22658 - RNA, 52 nt, synthetic construct
  source 1..52: mol_type = other RNA
gacaggtcctgccatttcaccaggaacatgtagacctgggggaaagccagag

SEQ ID NO: 22659 - RNA, 53 nt, synthetic construct
  source 1..53: mol_type = other RNA
cgacaggtcctgccatttcaccaggaacatgtagacctgggggaaagccagag

SEQ ID NO: 22660 - RNA, 53 nt, synthetic construct
  source 1..53: mol_type = other RNA
cgacaggtcctgccatttcaccaggaacatgtaaacctgggggaaagccagag

SEQ ID NO: 22661 - RNA, 53 nt, synthetic construct
  source 1..53: mol_type = other RNA
cgacaggtcctgccatttcaccaggaacatgtatacctgggggaaagccagag

SEQ ID NO: 22662 - RNA, 53 nt, synthetic construct
  source 1..53: mol_type = other RNA
cgacaggtcctgccatttcaccaggaacatgtacacctgggggaaagccagag

SEQ ID NO: 22663 - RNA, 54 nt, synthetic construct
  source 1..54: mol_type = other RNA
ccgacaggtcctgccatttcaccaggaacatgtagacctgggggaaagccagag

SEQ ID NO: 22664 - RNA, 54 nt, synthetic construct
  source 1..54: mol_type = other RNA
ccgacaggtcctgccatttcaccaggaacatgtacacctgggggaaagccagag

SEQ ID NO: 22665 - RNA, 54 nt, synthetic construct
  source 1..54: mol_type = other RNA
ccgacaggtcctgccatttcaccaggaacatgtaaacctgggggaaagccagag

SEQ ID NO: 22666 - RNA, 54 nt, synthetic construct
  source 1..54: mol_type = other RNA
ccgacaggtcctgccatttcaccaggaacatgtatacctgggggaaagccagag

SEQ ID NO: 22667 - RNA, 55 nt, synthetic construct
  source 1..55: mol_type = other RNA
tccgacaggtcctgccatttcaccaggaacatgtagacctgggggaaagccagag

SEQ ID NO: 22668 - RNA, 55 nt, synthetic construct
  source 1..55: mol_type = other RNA
tccgacaggtcctgccatttcaccaggaacatgtacacctgggggaaagccagag

SEQ ID NO: 22669 - RNA, 55 nt, synthetic construct
  source 1..55: mol_type = other RNA
tccgacaggtcctgccatttcaccaggaacatgtatacctgggggaaagccagag

SEQ ID NO: 22670 - RNA, 55 nt, synthetic construct
  source 1..55: mol_type = other RNA
tccgacaggtcctgccatttcaccaggaacatgtaaacctgggggaaagccagag

SEQ ID NO: 22671 - RNA, 56 nt, synthetic construct
  source 1..56: mol_type = other RNA
ctccgacaggtcctgccatttcaccaggaacatgtagacctgggggaaagccagag

SEQ ID NO: 22672 - RNA, 56 nt, synthetic construct
  source 1..56: mol_type = other RNA
ctccgacaggtcctgccatttcaccaggaacatgtaaacctgggggaaagccagag

SEQ ID NO: 22673 - RNA, 56 nt, synthetic construct
  source 1..56: mol_type = other RNA
ctccgacaggtcctgccatttcaccaggaacatgtacacctgggggaaagccagag

SEQ ID NO: 22674 - RNA, 56 nt, synthetic construct
  source 1..56: mol_type = other RNA
ctccgacaggtcctgccatttcaccaggaacatgtatacctgggggaaagccagag

SEQ ID NO: 22675 - RNA, 57 nt, synthetic construct
  source 1..57: mol_type = other RNA
tctccgacaggtcctgccatttcaccaggaacatgtatacctgggggaaagccagag

SEQ ID NO: 22676 - RNA, 57 nt, synthetic construct
  source 1..57: mol_type = other RNA
tctccgacaggtcctgccatttcaccaggaacatgtacacctgggggaaagccagag

SEQ ID NO: 22677 - RNA, 57 nt, synthetic construct
  source 1..57: mol_type = other RNA
tctccgacaggtcctgccatttcaccaggaacatgtaaacctgggggaaagccagag

SEQ ID NO: 22678 - RNA, 57 nt, synthetic construct
  source 1..57: mol_type = other RNA
tctccgacaggtcctgccatttcaccaggaacatgtagacctgggggaaagccagag

SEQ ID NO: 22679 - RNA, 58 nt, synthetic construct
  source 1..58: mol_type = other RNA
ttctccgacaggtcctgccatttcaccaggaacatgtacacctgggggaaagccagag

SEQ ID NO: 22680 - RNA, 58 nt, synthetic construct
  source 1..58: mol_type = other RNA
ttctccgacaggtcctgccatttcaccaggaacatgtatacctgggggaaagccagag

SEQ ID NO: 22681 - RNA, 58 nt, synthetic construct
  source 1..58: mol_type = other RNA
ttctccgacaggtcctgccatttcaccaggaacatgtaaacctgggggaaagccagag

SEQ ID NO: 22682 - RNA, 58 nt, synthetic construct
  source 1..58: mol_type = other RNA
ttctccgacaggtcctgccatttcaccaggaacatgtagacctgggggaaagccagag

SEQ ID NO: 22683 - RNA, 59 nt, synthetic construct
  source 1..59: mol_type = other RNA
cttctccgacaggtcctgccatttcaccaggaacatgtatacctgggggaaagccagag

SEQ ID NO: 22684 - RNA, 59 nt, synthetic construct
  source 1..59: mol_type = other RNA
cttctccgacaggtcctgccatttcaccaggaacatgtacacctgggggaaagccagag

SEQ ID NO: 22685 - RNA, 59 nt, synthetic construct
  source 1..59: mol_type = other RNA
cttctccgacaggtcctgccatttcaccaggaacatgtaaacctgggggaaagccagag

SEQ ID NO: 22686 - RNA, 59 nt, synthetic construct
  source 1..59: mol_type = other RNA
cttctccgacaggtcctgccatttcaccaggaacatgtagacctgggggaaagccagag

SEQ ID NO: 22687 - RNA, 60 nt, synthetic construct
  source 1..60: mol_type = other RNA
ccttctccgacaggtcctgccatttcaccaggaacatgtatacctgggggaaagccagag

SEQ ID NO: 22688 - RNA, 60 nt, synthetic construct
  source 1..60: mol_type = other RNA
ccttctccgacaggtcctgccatttcaccaggaacatgtagacctgggggaaagccagag

SEQ ID NO: 22689 - RNA, 60 nt, synthetic construct
  source 1..60: mol_type = other RNA
ccttctccgacaggtcctgccatttcaccaggaacatgtaaacctgggggaaagccagag

SEQ ID NO: 22690 - RNA, 60 nt, synthetic construct
  source 1..60: mol_type = other RNA
ccttctccgacaggtcctgccatttcaccaggaacatgtacacctgggggaaagccagag

SEQ ID NO: 22691 - RNA, 61 nt, synthetic construct
  source 1..61: mol_type = other RNA
accttctccgacaggtcctgccatttcaccaggaacatgtagacctgggggaaagccagag

SEQ ID NO: 22692 - RNA, 61 nt, synthetic construct
  source 1..61: mol_type = other RNA
accttctccgacaggtcctgccatttcaccaggaacatgtaaacctgggggaaagccagag

SEQ ID NO: 22693 - RNA, 61 nt, synthetic construct
  source 1..61: mol_type = other RNA
accttctccgacaggtcctgccatttcaccaggaacatgtatacctgggggaaagccagag

SEQ ID NO: 22694 - RNA, 61 nt, synthetic construct
  source 1..61: mol_type = other RNA
accttctccgacaggtcctgccatttcaccaggaacatgtacacctgggggaaagccagag

SEQ ID NO: 22695 - RNA, 62 nt, synthetic construct
  source 1..62: mol_type = other RNA
caccttctccgacaggtcctgccatttcaccaggaacatgtagacctgggggaaagccagag

SEQ ID NO: 22696 - RNA, 62 nt, synthetic construct
  source 1..62: mol_type = other RNA
caccttctccgacaggtcctgccatttcaccaggaacatgtaaacctgggggaaagccagag

SEQ ID NO: 22697 - RNA, 62 nt, synthetic construct
  source 1..62: mol_type = other RNA
caccttctccgacaggtcctgccatttcaccaggaacatgtatacctgggggaaagccagag

SEQ ID NO: 22698 - RNA, 62 nt, synthetic construct
  source 1..62: mol_type = other RNA
caccttctccgacaggtcctgccatttcaccaggaacatgtacacctgggggaaagccagag

SEQ ID NO: 22699 - RNA, 63 nt, synthetic construct
  source 1..63: mol_type = other RNA
ccaccttctccgacaggtcctgccatttcaccaggaacatgtagacctgggggaaagccagag

SEQ ID NO: 22700 - RNA, 63 nt, synthetic construct
  source 1..63: mol_type = other RNA
ccaccttctccgacaggtcctgccatttcaccaggaacatgtacacctgggggaaagccagag

SEQ ID NO: 22701 - RNA, 63 nt, synthetic construct
  source 1..63: mol_type = other RNA
ccaccttctccgacaggtcctgccatttcaccaggaacatgtaaacctgggggaaagccagag

SEQ ID NO: 22702 - RNA, 63 nt, synthetic construct
  source 1..63: mol_type = other RNA
ccaccttctccgacaggtcctgccatttcaccaggaacatgtatacctgggggaaagccagag

SEQ ID NO: 22703 - RNA, 64 nt, synthetic construct
  source 1..64: mol_type = other RNA
accaccttctccgacaggtcctgccatttcaccaggaacatgtatacctgggggaaagccagag

SEQ ID NO: 22704 - RNA, 64 nt, synthetic construct
  source 1..64: mol_type = other RNA
accaccttctccgacaggtcctgccatttcaccaggaacatgtagacctgggggaaagccagag

SEQ ID NO: 22705 - RNA, 64 nt, synthetic construct
  source 1..64: mol_type = other RNA
accaccttctccgacaggtcctgccatttcaccaggaacatgtacacctgggggaaagccagag

SEQ ID NO: 22706 - RNA, 64 nt, synthetic construct
  source 1..64: mol_type = other RNA
accaccttctccgacaggtcctgccatttcaccaggaacatgtaaacctgggggaaagccagag

SEQ ID NO: 22707 - RNA, 65 nt, synthetic construct
  source 1..65: mol_type = other RNA
gaccaccttctccgacaggtcctgccatttcaccaggaacatgtaaacctgggggaaagccagag

SEQ ID NO: 22708 - RNA, 65 nt, synthetic construct
  source 1..65: mol_type = other RNA
gaccaccttctccgacaggtcctgccatttcaccaggaacatgtagacctgggggaaagccagag

SEQ ID NO: 22709 - RNA, 65 nt, synthetic construct
  source 1..65: mol_type = other RNA
gaccaccttctccgacaggtcctgccatttcaccaggaacatgtacacctgggggaaagccagag

SEQ ID NO: 22710 - RNA, 65 nt, synthetic construct
  source 1..65: mol_type = other RNA
gaccaccttctccgacaggtcctgccatttcaccaggaacatgtatacctgggggaaagccagag

SEQ ID NO: 22711 - RNA, 66 nt, synthetic construct
  source 1..66: mol_type = other RNA
agaccaccttctccgacaggtcctgccatttcaccaggaacatgtatacctgggggaaagccagag

SEQ ID NO: 22712 - RNA, 66 nt, synthetic construct
  source 1..66: mol_type = other RNA
agaccaccttctccgacaggtcctgccatttcaccaggaacatgtagacctgggggaaagccagag

SEQ ID NO: 22713 - RNA, 66 nt, synthetic construct
  source 1..66: mol_type = other RNA
agaccaccttctccgacaggtcctgccatttcaccaggaacatgtacacctgggggaaagccagag

SEQ ID NO: 22714 - RNA, 66 nt, synthetic construct
  source 1..66: mol_type = other RNA
agaccaccttctccgacaggtcctgccatttcaccaggaacatgtaaacctgggggaaagccagag

SEQ ID NO: 22715 - RNA, 67 nt, synthetic construct
  source 1..67: mol_type = other RNA
tagaccaccttctccgacaggtcctgccatttcaccaggaacatgtaaacctgggggaaagccagag

SEQ ID NO: 22716 - RNA, 67 nt, synthetic construct
  source 1..67: mol_type = other RNA
tagaccaccttctccgacaggtcctgccatttcaccaggaacatgtatacctgggggaaagccagag

SEQ ID NO: 22717 - RNA, 67 nt, synthetic construct
  source 1..67: mol_type = other RNA
tagaccaccttctccgacaggtcctgccatttcaccaggaacatgtacacctgggggaaagccagag

SEQ ID NO: 22718 - RNA, 67 nt, synthetic construct
  source 1..67: mol_type = other RNA
tagaccaccttctccgacaggtcctgccatttcaccaggaacatgtagacctgggggaaagccagag

SEQ ID NO: 22719 - RNA, 68 nt, synthetic construct
  source 1..68: mol_type = other RNA
gtagaccaccttctccgacaggtcctgccatttcaccaggaacatgtagacctgggggaaagccagag

SEQ ID NO: 22720 - RNA, 68 nt, synthetic construct
  source 1..68: mol_type = other RNA
gtagaccaccttctccgacaggtcctgccatttcaccaggaacatgtacacctgggggaaagccagag

SEQ ID NO: 22721 - RNA, 68 nt, synthetic construct
  source 1..68: mol_type = other RNA
gtagaccaccttctccgacaggtcctgccatttcaccaggaacatgtaaacctgggggaaagccagag

SEQ ID NO: 22722 - RNA, 68 nt, synthetic construct
  source 1..68: mol_type = other RNA
gtagaccaccttctccgacaggtcctgccatttcaccaggaacatgtatacctgggggaaagccagag

SEQ ID NO: 22723 - RNA, 69 nt, synthetic construct
  source 1..69: mol_type = other RNA
ggtagaccaccttctccgacaggtcctgccatttcaccaggaacatgtatacctgggggaaagccagag

SEQ ID NO: 22724 - RNA, 69 nt, synthetic construct
  source 1..69: mol_type = other RNA
ggtagaccaccttctccgacaggtcctgccatttcaccaggaacatgtaaacctgggggaaagccagag

SEQ ID NO: 22725 - RNA, 69 nt, synthetic construct
  source 1..69: mol_type = other RNA
ggtagaccaccttctccgacaggtcctgccatttcaccaggaacatgtagacctgggggaaagccagag

SEQ ID NO: 22726 - RNA, 69 nt, synthetic construct
  source 1..69: mol_type = other RNA
ggtagaccaccttctccgacaggtcctgccatttcaccaggaacatgtacacctgggggaaagccagag

SEQ ID NO: 22727 - RNA, 70 nt, synthetic construct
  source 1..70: mol_type = other RNA
cggtagaccaccttctccgacaggtcctgccatttcaccaggaacatgtacacctgggggaaagccagag

SEQ ID NO: 22728 - RNA, 70 nt, synthetic construct
  source 1..70: mol_type = other RNA
cggtagaccaccttctccgacaggtcctgccatttcaccaggaacatgtatacctgggggaaagccagag

SEQ ID NO: 22729 - RNA, 70 nt, synthetic construct
  source 1..70: mol_type = other RNA
cggtagaccaccttctccgacaggtcctgccatttcaccaggaacatgtagacctgggggaaagccagag

SEQ ID NO: 22730 - RNA, 70 nt, synthetic construct
  source 1..70: mol_type = other RNA
cggtagaccaccttctccgacaggtcctgccatttcaccaggaacatgtaaacctgggggaaagccagag

SEQ ID NO: 22731 - RNA, 71 nt, synthetic construct
  source 1..71: mol_type = other RNA
ccggtagaccaccttctccgacaggtcctgccatttcaccaggaacatgtagacctgggggaaagccagag

SEQ ID NO: 22732 - RNA, 71 nt, synthetic construct
  source 1..71: mol_type = other RNA
ccggtagaccaccttctccgacaggtcctgccatttcaccaggaacatgtatacctgggggaaagccagag

SEQ ID NO: 22733 - RNA, 71 nt, synthetic construct
  source 1..71: mol_type = other RNA
ccggtagaccaccttctccgacaggtcctgccatttcaccaggaacatgtaaacctgggggaaagccagag

SEQ ID NO: 22734 - RNA, 71 nt, synthetic construct
  source 1..71: mol_type = other RNA
ccggtagaccaccttctccgacaggtcctgccatttcaccaggaacatgtacacctgggggaaagccagag

SEQ ID NO: 22735 - RNA, 72 nt, synthetic construct
  source 1..72: mol_type = other RNA
gccggtagaccaccttctccgacaggtcctgccatttcaccaggaacatgtacacctgggggaaagccagag

SEQ ID NO: 22736 - RNA, 72 nt, synthetic construct
  source 1..72: mol_type = other RNA
gccggtagaccaccttctccgacaggtcctgccatttcaccaggaacatgtatacctgggggaaagccagag

SEQ ID NO: 22737 - RNA, 72 nt, synthetic construct
  source 1..72: mol_type = other RNA
gccggtagaccaccttctccgacaggtcctgccatttcaccaggaacatgtagacctgggggaaagccagag

SEQ ID NO: 22738 - RNA, 72 nt, synthetic construct
  source 1..72: mol_type = other RNA
gccggtagaccaccttctccgacaggtcctgccatttcaccaggaacatgtaaacctgggggaaagccagag

SEQ ID NO: 22739 - RNA, 73 nt, synthetic construct
  source 1..73: mol_type = other RNA
cgccggtagaccaccttctccgacaggtcctgccatttcaccaggaacatgtacacctgggggaaagccagag

SEQ ID NO: 22740 - RNA, 73 nt, synthetic construct
  source 1..73: mol_type = other RNA
cgccggtagaccaccttctccgacaggtcctgccatttcaccaggaacatgtatacctgggggaaagccagag

SEQ ID NO: 22741 - RNA, 73 nt, synthetic construct
  source 1..73: mol_type = other RNA
cgccggtagaccaccttctccgacaggtcctgccatttcaccaggaacatgtagacctgggggaaagccagag

SEQ ID NO: 22742 - RNA, 73 nt, synthetic construct
  source 1..73: mol_type = other RNA
cgccggtagaccaccttctccgacaggtcctgccatttcaccaggaacatgtaaacctgggggaaagccagag

SEQ ID NO: 22743 - RNA, 74 nt, synthetic construct
  source 1..74: mol_type = other RNA
gcgccggtagaccaccttctccgacaggtcctgccatttcaccaggaacatgtaaacctgggggaaagccagag

SEQ ID NO: 22744 - RNA, 74 nt, synthetic construct
  source 1..74: mol_type = other RNA
gcgccggtagaccaccttctccgacaggtcctgccatttcaccaggaacatgtagacctgggggaaagccagag

SEQ ID NO: 22745 - RNA, 74 nt, synthetic construct
  source 1..74: mol_type = other RNA
gcgccggtagaccaccttctccgacaggtcctgccatttcaccaggaacatgtacacctgggggaaagccagag

SEQ ID NO: 22746 - RNA, 74 nt, synthetic construct
  source 1..74: mol_type = other RNA
gcgccggtagaccaccttctccgacaggtcctgccatttcaccaggaacatgtatacctgggggaaagccagag

SEQ ID NO: 22747 - RNA, 75 nt, synthetic construct
  source 1..75: mol_type = other RNA
agcgccggtagaccaccttctccgacaggtcctgccatttcaccaggaacatgtacacctgggggaaagccagag

SEQ ID NO: 22748 - RNA, 75 nt, synthetic construct
  source 1..75: mol_type = other RNA
agcgccggtagaccaccttctccgacaggtcctgccatttcaccaggaacatgtaaacctgggggaaagccagag

SEQ ID NO: 22749 - RNA, 75 nt, synthetic construct
  source 1..75: mol_type = other RNA
agcgccggtagaccaccttctccgacaggtcctgccatttcaccaggaacatgtatacctgggggaaagccagag

SEQ ID NO: 22750 - RNA, 75 nt, synthetic construct
  source 1..75: mol_type = other RNA
agcgccggtagaccaccttctccgacaggtcctgccatttcaccaggaacatgtagacctgggggaaagccagag

SEQ ID NO: 22751 - RNA, 76 nt, synthetic construct
  source 1..76: mol_type = other RNA
aagcgccggtagaccaccttctccgacaggtcctgccatttcaccaggaacatgtatacctgggggaaagccagag

SEQ ID NO: 22752 - RNA, 76 nt, synthetic construct
  source 1..76: mol_type = other RNA
aagcgccggtagaccaccttctccgacaggtcctgccatttcaccaggaacatgtagacctgggggaaagccagag

SEQ ID NO: 22753 - RNA, 76 nt, synthetic construct
  source 1..76: mol_type = other RNA
aagcgccggtagaccaccttctccgacaggtcctgccatttcaccaggaacatgtaaacctgggggaaagccagag

SEQ ID NO: 22754 - RNA, 76 nt, synthetic construct
  source 1..76: mol_type = other RNA
aagcgccggtagaccaccttctccgacaggtcctgccatttcaccaggaacatgtacacctgggggaaagccagag

SEQ ID NO: 22755 - RNA, 77 nt, synthetic construct
  source 1..77: mol_type = other RNA
gaagcgccggtagaccaccttctccgacaggtcctgccatttcaccaggaacatgtaaacctgggggaaagccagag

SEQ ID NO: 22756 - RNA, 77 nt, synthetic construct
  source 1..77: mol_type = other RNA
gaagcgccggtagaccaccttctccgacaggtcctgccatttcaccaggaacatgtatacctgggggaaagccagag

SEQ ID NO: 22757 - RNA, 77 nt, synthetic construct
  source 1..77: mol_type = other RNA
gaagcgccggtagaccaccttctccgacaggtcctgccatttcaccaggaacatgtagacctgggggaaagccagag

SEQ ID NO: 22758 - RNA, 77 nt, synthetic construct
  source 1..77: mol_type = other RNA
gaagcgccggtagaccaccttctccgacaggtcctgccatttcaccaggaacatgtacacctgggggaaagccagag

SEQ ID NO: 22759 - RNA, 78 nt, synthetic construct
  source 1..78: mol_type = other RNA
tgaagcgccggtagaccaccttctccgacaggtcctgccatttcaccaggaacatgtaaacctgggggaaagccagag

SEQ ID NO: 22760 - RNA, 78 nt, synthetic construct
  source 1..78: mol_type = other RNA
tgaagcgccggtagaccaccttctccgacaggtcctgccatttcaccaggaacatgtacacctgggggaaagccagag

SEQ ID NO: 22761 - RNA, 78 nt, synthetic construct
  source 1..78: mol_type = other RNA
tgaagcgccggtagaccaccttctccgacaggtcctgccatttcaccaggaacatgtatacctgggggaaagccagag

SEQ ID NO: 22762 - RNA, 78 nt, synthetic construct
  source 1..78: mol_type = other RNA
tgaagcgccggtagaccaccttctccgacaggtcctgccatttcaccaggaacatgtagacctgggggaaagccagag

SEQ ID NO: 22763 - RNA, 79 nt, synthetic construct
  source 1..79: mol_type = other RNA
gtgaagcgccggtagaccaccttctccgacaggtcctgccatttcaccaggaacatgtatacctgggggaaagccagag

SEQ ID NO: 22764 - RNA, 79 nt, synthetic construct
  source 1..79: mol_type = other RNA
gtgaagcgccggtagaccaccttctccgacaggtcctgccatttcaccaggaacatgtacacctgggggaaagccagag

SEQ ID NO: 22765 - RNA, 79 nt, synthetic construct
  source 1..79: mol_type = other RNA
gtgaagcgccggtagaccaccttctccgacaggtcctgccatttcaccaggaacatgtaaacctgggggaaagccagag

SEQ ID NO: 22766 - RNA, 79 nt, synthetic construct
  source 1..79: mol_type = other RNA
gtgaagcgccggtagaccaccttctccgacaggtcctgccatttcaccaggaacatgtagacctgggggaaagccagag

SEQ ID NO: 22767 - RNA, 80 nt, synthetic construct
  source 1..80: mol_type = other RNA
ggtgaagcgccggtagaccaccttctccgacaggtcctgccatttcaccaggaacatgtagacctgggggaaagccagag

SEQ ID NO: 22768 - RNA, 80 nt, synthetic construct
  source 1..80: mol_type = other RNA
ggtgaagcgccggtagaccaccttctccgacaggtcctgccatttcaccaggaacatgtatacctgggggaaagccagag

SEQ ID NO: 22769 - RNA, 80 nt, synthetic construct
  source 1..80: mol_type = other RNA
ggtgaagcgccggtagaccaccttctccgacaggtcctgccatttcaccaggaacatgtaaacctgggggaaagccagag

SEQ ID NO: 22770 - RNA, 80 nt, synthetic construct
  source 1..80: mol_type = other RNA
ggtgaagcgccggtagaccaccttctccgacaggtcctgccatttcaccaggaacatgtacacctgggggaaagccagag

SEQ ID NO: 22771 - RNA, 81 nt, synthetic construct
  source 1..81: mol_type = other RNA
cggtgaagcgccggtagaccaccttctccgacaggtcctgccatttcaccaggaacatgtaaacctgggggaaagccagag

SEQ ID NO: 22772 - RNA, 81 nt, synthetic construct
  source 1..81: mol_type = other RNA
cggtgaagcgccggtagaccaccttctccgacaggtcctgccatttcaccaggaacatgtagacctgggggaaagccagag

SEQ ID NO: 22773 - RNA, 81 nt, synthetic construct
  source 1..81: mol_type = other RNA
cggtgaagcgccggtagaccaccttctccgacaggtcctgccatttcaccaggaacatgtacacctgggggaaagccagag

SEQ ID NO: 22774 - RNA, 81 nt, synthetic construct
  source 1..81: mol_type = other RNA
cggtgaagcgccggtagaccaccttctccgacaggtcctgccatttcaccaggaacatgtatacctgggggaaagccagag

SEQ ID NO: 22775 - RNA, 82 nt, synthetic construct
  source 1..82: mol_type = other RNA
tcggtgaagcgccggtagaccaccttctccgacaggtcctgccatttcaccaggaacatgtatacctgggggaaagccagag

SEQ ID NO: 22776 - RNA, 82 nt, synthetic construct
  source 1..82: mol_type = other RNA
tcggtgaagcgccggtagaccaccttctccgacaggtcctgccatttcaccaggaacatgtaaacctgggggaaagccagag

SEQ ID NO: 22777 - RNA, 82 nt, synthetic construct
  source 1..82: mol_type = other RNA
tcggtgaagcgccggtagaccaccttctccgacaggtcctgccatttcaccaggaacatgtacacctgggggaaagccagag

SEQ ID NO: 22778 - RNA, 82 nt, synthetic construct
  source 1..82: mol_type = other RNA
tcggtgaagcgccggtagaccaccttctccgacaggtcctgccatttcaccaggaacatgtagacctgggggaaagccagag

SEQ ID NO: 22779 - RNA, 83 nt, synthetic construct
  source 1..83: mol_type = other RNA
ctcggtgaagcgccggtagaccaccttctccgacaggtcctgccatttcaccaggaacatgtacacctgggggaaagccagag

SEQ ID NO: 22780 - RNA, 83 nt, synthetic construct
  source 1..83: mol_type = other RNA
ctcggtgaagcgccggtagaccaccttctccgacaggtcctgccatttcaccaggaacatgtaaacctgggggaaagccagag

SEQ ID NO: 22781 - RNA, 83 nt, synthetic construct
  source 1..83: mol_type = other RNA
ctcggtgaagcgccggtagaccaccttctccgacaggtcctgccatttcaccaggaacatgtagacctgggggaaagccagag

SEQ ID NO: 22782 - RNA, 83 nt, synthetic construct
  source 1..83: mol_type = other RNA
ctcggtgaagcgccggtagaccaccttctccgacaggtcctgccatttcaccaggaacatgtatacctgggggaaagccagag

SEQ ID NO: 22783 - RNA, 84 nt, synthetic construct
  source 1..84: mol_type = other RNA
tctcggtgaagcgccggtagaccaccttctccgacaggtcctgccatttcaccaggaacatgtacacctgggggaaagccagag

SEQ ID NO: 22784 - RNA, 84 nt, synthetic construct
  source 1..84: mol_type = other RNA
tctcggtgaagcgccggtagaccaccttctccgacaggtcctgccatttcaccaggaacatgtaaacctgggggaaagccagag

SEQ ID NO: 22785 - RNA, 84 nt, synthetic construct
  source 1..84: mol_type = other RNA
tctcggtgaagcgccggtagaccaccttctccgacaggtcctgccatttcaccaggaacatgtagacctgggggaaagccagag

SEQ ID NO: 22786 - RNA, 84 nt, synthetic construct
  source 1..84: mol_type = other RNA
tctcggtgaagcgccggtagaccaccttctccgacaggtcctgccatttcaccaggaacatgtatacctgggggaaagccagag

SEQ ID NO: 22787 - RNA, 85 nt, synthetic construct
  source 1..85: mol_type = other RNA
atctcggtgaagcgccggtagaccaccttctccgacaggtcctgccatttcaccaggaacatgtaaacctgggggaaagccagag

SEQ ID NO: 22788 - RNA, 85 nt, synthetic construct
  source 1..85: mol_type = other RNA
atctcggtgaagcgccggtagaccaccttctccgacaggtcctgccatttcaccaggaacatgtatacctgggggaaagccagag

SEQ ID NO: 22789 - RNA, 85 nt, synthetic construct
  source 1..85: mol_type = other RNA
atctcggtgaagcgccggtagaccaccttctccgacaggtcctgccatttcaccaggaacatgtagacctgggggaaagccagag

SEQ ID NO: 22790 - RNA, 85 nt, synthetic construct
  source 1..85: mol_type = other RNA
atctcggtgaagcgccggtagaccaccttctccgacaggtcctgccatttcaccaggaacatgtacacctgggggaaagccagag

SEQ ID NO: 22791 - RNA, 86 nt, synthetic construct
  source 1..86: mol_type = other RNA
gatctcggtgaagcgccggtagaccaccttctccgacaggtcctgccatttcaccaggaacatgtatacctgggggaaagccagag

SEQ ID NO: 22792 - RNA, 86 nt, synthetic construct
  source 1..86: mol_type = other RNA
gatctcggtgaagcgccggtagaccaccttctccgacaggtcctgccatttcaccaggaacatgtaaacctgggggaaagccagag

SEQ ID NO: 22793 - RNA, 86 nt, synthetic construct
  source 1..86: mol_type = other RNA
gatctcggtgaagcgccggtagaccaccttctccgacaggtcctgccatttcaccaggaacatgtagacctgggggaaagccagag

SEQ ID NO: 22794 - RNA, 86 nt, synthetic construct
  source 1..86: mol_type = other RNA
gatctcggtgaagcgccggtagaccaccttctccgacaggtcctgccatttcaccaggaacatgtacacctgggggaaagccagag

SEQ ID NO: 22795 - RNA, 87 nt, synthetic construct
  source 1..87: mol_type = other RNA
agatctcggtgaagcgccggtagaccaccttctccgacaggtcctgccatttcaccaggaacatgtaaacctgggggaaagccagag

SEQ ID NO: 22796 - RNA, 87 nt, synthetic construct
  source 1..87: mol_type = other RNA
agatctcggtgaagcgccggtagaccaccttctccgacaggtcctgccatttcaccaggaacatgtacacctgggggaaagccagag

SEQ ID NO: 22797 - RNA, 87 nt, synthetic construct
  source 1..87: mol_type = other RNA
agatctcggtgaagcgccggtagaccaccttctccgacaggtcctgccatttcaccaggaacatgtagacctgggggaaagccagag

SEQ ID NO: 22798 - RNA, 87 nt, synthetic construct
  source 1..87: mol_type = other RNA
agatctcggtgaagcgccggtagaccaccttctccgacaggtcctgccatttcaccaggaacatgtatacctgggggaaagccagag

SEQ ID NO: 22799 - RNA, 88 nt, synthetic construct
  source 1..88: mol_type = other RNA
tagatctcggtgaagcgccggtagaccaccttctccgacaggtcctgccatttcaccaggaacatgtatacctgggggaaagccagag

SEQ ID NO: 22800 - RNA, 88 nt, synthetic construct
  source 1..88: mol_type = other RNA
tagatctcggtgaagcgccggtagaccaccttctccgacaggtcctgccatttcaccaggaacatgtagacctgggggaaagccagag

SEQ ID NO: 22801 - RNA, 88 nt, synthetic construct
  source 1..88: mol_type = other RNA
tagatctcggtgaagcgccggtagaccaccttctccgacaggtcctgccatttcaccaggaacatgtacacctgggggaaagccagag

SEQ ID NO: 22802 - RNA, 88 nt, synthetic construct
  source 1..88: mol_type = other RNA
tagatctcggtgaagcgccggtagaccaccttctccgacaggtcctgccatttcaccaggaacatgtaaacctgggggaaagccagag

SEQ ID NO: 22803 - RNA, 89 nt, synthetic construct
  source 1..89: mol_type = other RNA
gtagatctcggtgaagcgccggtagaccaccttctccgacaggtcctgccatttcaccaggaacatgtacacctgggggaaagccagag

SEQ ID NO: 22804 - RNA, 89 nt, synthetic construct
  source 1..89: mol_type = other RNA
gtagatctcggtgaagcgccggtagaccaccttctccgacaggtcctgccatttcaccaggaacatgtagacctgggggaaagccagag

SEQ ID NO: 22805 - RNA, 89 nt, synthetic construct
  source 1..89: mol_type = other RNA
gtagatctcggtgaagcgccggtagaccaccttctccgacaggtcctgccatttcaccaggaacatgtaaacctgggggaaagccagag

SEQ ID NO: 22806 - RNA, 89 nt, synthetic construct
  source 1..89: mol_type = other RNA
gtagatctcggtgaagcgccggtagaccaccttctccgacaggtcctgccatttcaccaggaacatgtatacctgggggaaagccagag

SEQ ID NO: 22807 - RNA, 90 nt, synthetic construct
  source 1..90: mol_type = other RNA
cgtagatctcggtgaagcgccggtagaccaccttctccgacaggtcctgccatttcaccaggaacatgtacacctgggggaaagccagag

SEQ ID NO: 22808 - RNA, 90 nt, synthetic construct
  source 1..90: mol_type = other RNA
cgtagatctcggtgaagcgccggtagaccaccttctccgacaggtcctgccatttcaccaggaacatgtagacctgggggaaagccagag

SEQ ID NO: 22809 - RNA, 90 nt, synthetic construct
  source 1..90: mol_type = other RNA
cgtagatctcggtgaagcgccggtagaccaccttctccgacaggtcctgccatttcaccaggaacatgtatacctgggggaaagccagag

SEQ ID NO: 22810 - RNA, 90 nt, synthetic construct
  source 1..90: mol_type = other RNA
cgtagatctcggtgaagcgccggtagaccaccttctccgacaggtcctgccatttcaccaggaacatgtaaacctgggggaaagccagag

SEQ ID NO: 22811 - RNA, 91 nt, synthetic construct
  source 1..91: mol_type = other RNA
tcgtagatctcggtgaagcgccggtagaccaccttctccgacaggtcctgccatttcaccaggaacatgtatacctgggggaaagccagag

SEQ ID NO: 22812 - RNA, 91 nt, synthetic construct
  source 1..91: mol_type = other RNA
tcgtagatctcggtgaagcgccggtagaccaccttctccgacaggtcctgccatttcaccaggaacatgtagacctgggggaaagccagag

SEQ ID NO: 22813 - RNA, 91 nt, synthetic construct
  source 1..91: mol_type = other RNA
tcgtagatctcggtgaagcgccggtagaccaccttctccgacaggtcctgccatttcaccaggaacatgtacacctgggggaaagccagag

SEQ ID NO: 22814 - RNA, 91 nt, synthetic construct
  source 1..91: mol_type = other RNA
tcgtagatctcggtgaagcgccggtagaccaccttctccgacaggtcctgccatttcaccaggaacatgtaaacctgggggaaagccagag

SEQ ID NO: 22815 - RNA, 92 nt, synthetic construct
  source 1..92: mol_type = other RNA
ctcgtagatctcggtgaagcgccggtagaccaccttctccgacaggtcctgccatttcaccaggaacatgtaaacctgggggaaagccagag

SEQ ID NO: 22816 - RNA, 92 nt, synthetic construct
  source 1..92: mol_type = other RNA
ctcgtagatctcggtgaagcgccggtagaccaccttctccgacaggtcctgccatttcaccaggaacatgtagacctgggggaaagccagag

SEQ ID NO: 22817 - RNA, 92 nt, synthetic construct
  source 1..92: mol_type = other RNA
ctcgtagatctcggtgaagcgccggtagaccaccttctccgacaggtcctgccatttcaccaggaacatgtatacctgggggaaagccagag

SEQ ID NO: 22818 - RNA, 92 nt, synthetic construct
  source 1..92: mol_type = other RNA
ctcgtagatctcggtgaagcgccggtagaccaccttctccgacaggtcctgccatttcaccaggaacatgtacacctgggggaaagccagag

SEQ ID NO: 22819 - RNA, 93 nt, synthetic construct
  source 1..93: mol_type = other RNA
actcgtagatctcggtgaagcgccggtagaccaccttctccgacaggtcctgccatttcaccaggaacatgtagacctgggggaaagccagag

SEQ ID NO: 22820 - RNA, 93 nt, synthetic construct
  source 1..93: mol_type = other RNA
actcgtagatctcggtgaagcgccggtagaccaccttctccgacaggtcctgccatttcaccaggaacatgtacacctgggggaaagccagag

SEQ ID NO: 22821 - RNA, 93 nt, synthetic construct
  source 1..93: mol_type = other RNA
actcgtagatctcggtgaagcgccggtagaccaccttctccgacaggtcctgccatttcaccaggaacatgtaaacctgggggaaagccagag

SEQ ID NO: 22822 - RNA, 93 nt, synthetic construct
  source 1..93: mol_type = other RNA
actcgtagatctcggtgaagcgccggtagaccaccttctccgacaggtcctgccatttcaccaggaacatgtatacctgggggaaagccagag

SEQ ID NO: 22823 - RNA, 94 nt, synthetic construct
  source 1..94: mol_type = other RNA
aactcgtagatctcggtgaagcgccggtagaccaccttctccgacaggtcctgccatttcaccaggaacatgtacacctgggggaaagccagag

SEQ ID NO: 22824 - RNA, 94 nt, synthetic construct
  source 1..94: mol_type = other RNA
aactcgtagatctcggtgaagcgccggtagaccaccttctccgacaggtcctgccatttcaccaggaacatgtaaacctgggggaaagccagag

SEQ ID NO: 22825 - RNA, 94 nt, synthetic construct
  source 1..94: mol_type = other RNA
aactcgtagatctcggtgaagcgccggtagaccaccttctccgacaggtcctgccatttcaccaggaacatgtagacctgggggaaagccagag

SEQ ID NO: 22826 - RNA, 94 nt, synthetic construct
  source 1..94: mol_type = other RNA
aactcgtagatctcggtgaagcgccggtagaccaccttctccgacaggtcctgccatttcaccaggaacatgtatacctgggggaaagccagag

SEQ ID NO: 22827 - RNA, 95 nt, synthetic construct
  source 1..95: mol_type = other RNA
gaactcgtagatctcggtgaagcgccggtagaccaccttctccgacaggtcctgccatttcaccaggaacatgtacacctgggggaaagccagag

SEQ ID NO: 22828 - RNA, 95 nt, synthetic construct
  source 1..95: mol_type = other RNA
gaactcgtagatctcggtgaagcgccggtagaccaccttctccgacaggtcctgccatttcaccaggaacatgtagacctgggggaaagccagag

SEQ ID NO: 22829 - RNA, 95 nt, synthetic construct
  source 1..95: mol_type = other RNA
gaactcgtagatctcggtgaagcgccggtagaccaccttctccgacaggtcctgccatttcaccaggaacatgtaaacctgggggaaagccagag

SEQ ID NO: 22830 - RNA, 95 nt, synthetic construct
  source 1..95: mol_type = other RNA
gaactcgtagatctcggtgaagcgccggtagaccaccttctccgacaggtcctgccatttcaccaggaacatgtatacctgggggaaagccagag

SEQ ID NO: 22831 - RNA, 96 nt, synthetic construct
  source 1..96: mol_type = other RNA
ggaactcgtagatctcggtgaagcgccggtagaccaccttctccgacaggtcctgccatttcaccaggaacatgtatacctgggggaaagccagag

SEQ ID NO: 22832 - RNA, 96 nt, synthetic construct
  source 1..96: mol_type = other RNA
ggaactcgtagatctcggtgaagcgccggtagaccaccttctccgacaggtcctgccatttcaccaggaacatgtaaacctgggggaaagccagag

SEQ ID NO: 22833 - RNA, 96 nt, synthetic construct
  source 1..96: mol_type = other RNA
ggaactcgtagatctcggtgaagcgccggtagaccaccttctccgacaggtcctgccatttcaccaggaacatgtacacctgggggaaagccagag

SEQ ID NO: 22834 - RNA, 96 nt, synthetic construct
  source 1..96: mol_type = other RNA
ggaactcgtagatctcggtgaagcgccggtagaccaccttctccgacaggtcctgccatttcaccaggaacatgtagacctgggggaaagccagag

SEQ ID NO: 22835 - RNA, 97 nt, synthetic construct
  source 1..97: mol_type = other RNA
tggaactcgtagatctcggtgaagcgccggtagaccaccttctccgacaggtcctgccatttcaccaggaacatgtaaacctgggggaaagccagag

SEQ ID NO: 22836 - RNA, 97 nt, synthetic construct
  source 1..97: mol_type = other RNA
tggaactcgtagatctcggtgaagcgccggtagaccaccttctccgacaggtcctgccatttcaccaggaacatgtacacctgggggaaagccagag

SEQ ID NO: 22837 - RNA, 97 nt, synthetic construct
  source 1..97: mol_type = other RNA
tggaactcgtagatctcggtgaagcgccggtagaccaccttctccgacaggtcctgccatttcaccaggaacatgtagacctgggggaaagccagag

SEQ ID NO: 22838 - RNA, 97 nt, synthetic construct
  source 1..97: mol_type = other RNA
tggaactcgtagatctcggtgaagcgccggtagaccaccttctccgacaggtcctgccatttcaccaggaacatgtatacctgggggaaagccagag

SEQ ID NO: 22839 - RNA, 98 nt, synthetic construct
  source 1..98: mol_type = other RNA
atggaactcgtagatctcggtgaagcgccggtagaccaccttctccgacaggtcctgccatttcaccaggaacatgtatacctgggggaaagccagag

SEQ ID NO: 22840 - RNA, 98 nt, synthetic construct
  source 1..98: mol_type = other RNA
atggaactcgtagatctcggtgaagcgccggtagaccaccttctccgacaggtcctgccatttcaccaggaacatgtagacctgggggaaagccagag

SEQ ID NO: 22841 - RNA, 98 nt, synthetic construct
  source 1..98: mol_type = other RNA
atggaactcgtagatctcggtgaagcgccggtagaccaccttctccgacaggtcctgccatttcaccaggaacatgtacacctgggggaaagccagag

SEQ ID NO: 22842 - RNA, 98 nt, synthetic construct
  source 1..98: mol_type = other RNA
atggaactcgtagatctcggtgaagcgccggtagaccaccttctccgacaggtcctgccatttcaccaggaacatgtaaacctgggggaaagccagag

SEQ ID NO: 22843 - RNA, 99 nt, synthetic construct
  source 1..99: mol_type = other RNA
catggaactcgtagatctcggtgaagcgccggtagaccaccttctccgacaggtcctgccatttcaccaggaacatgtagacctgggggaaagccagag

SEQ ID NO: 22844 - RNA, 99 nt, synthetic construct
  source 1..99: mol_type = other RNA
catggaactcgtagatctcggtgaagcgccggtagaccaccttctccgacaggtcctgccatttcaccaggaacatgtatacctgggggaaagccagag

SEQ ID NO: 22845 - RNA, 99 nt, synthetic construct
  source 1..99: mol_type = other RNA
catggaactcgtagatctcggtgaagcgccggtagaccaccttctccgacaggtcctgccatttcaccaggaacatgtaaacctgggggaaagccagag

SEQ ID NO: 22846 - RNA, 99 nt, synthetic construct
  source 1..99: mol_type = other RNA
catggaactcgtagatctcggtgaagcgccggtagaccaccttctccgacaggtcctgccatttcaccaggaacatgtacacctgggggaaagccagag

SEQ ID NO: 22847 - RNA, 100 nt, synthetic construct
  source 1..100: mol_type = other RNA
acatggaactcgtagatctcggtgaagcgccggtagaccaccttctccgacaggtcctgccatttcaccaggaacatgtatacctgggggaaagccagag

SEQ ID NO: 22848 - RNA, 100 nt, synthetic construct
  source 1..100: mol_type = other RNA
acatggaactcgtagatctcggtgaagcgccggtagaccaccttctccgacaggtcctgccatttcaccaggaacatgtacacctgggggaaagccagag

SEQ ID NO: 22849 - RNA, 100 nt, synthetic construct
  source 1..100: mol_type = other RNA
acatggaactcgtagatctcggtgaagcgccggtagaccaccttctccgacaggtcctgccatttcaccaggaacatgtaaacctgggggaaagccagag

SEQ ID NO: 22850 - RNA, 100 nt, synthetic construct
  source 1..100: mol_type = other RNA
acatggaactcgtagatctcggtgaagcgccggtagaccaccttctccgacaggtcctgccatttcaccaggaacatgtagacctgggggaaagccagag

SEQ ID NO: 22851 - RNA, 101 nt, synthetic construct
  source 1..101: mol_type = other RNA
cacatggaactcgtagatctcggtgaagcgccggtagaccaccttctccgacaggtcctgccatttcaccaggaacatgtaaacctgggggaaagccagag

SEQ ID NO: 22852 - RNA, 101 nt, synthetic construct
  source 1..101: mol_type = other RNA
cacatggaactcgtagatctcggtgaagcgccggtagaccaccttctccgacaggtcctgccatttcaccaggaacatgtacacctgggggaaagccagag

SEQ ID NO: 22853 - RNA, 101 nt, synthetic construct
  source 1..101: mol_type = other RNA
cacatggaactcgtagatctcggtgaagcgccggtagaccaccttctccgacaggtcctgccatttcaccaggaacatgtagacctgggggaaagccagag

SEQ ID NO: 22854 - RNA, 101 nt, synthetic construct
  source 1..101: mol_type = other RNA
cacatggaactcgtagatctcggtgaagcgccggtagaccaccttctccgacaggtcctgccatttcaccaggaacatgtatacctgggggaaagccagag

SEQ ID NO: 22855 - RNA, 102 nt, synthetic construct
  source 1..102: mol_type = other RNA
tcacatggaactcgtagatctcggtgaagcgccggtagaccaccttctccgacaggtcctgccatttcaccaggaacatgtacacctgggggaaagccagag

SEQ ID NO: 22856 - RNA, 102 nt, synthetic construct
  source 1..102: mol_type = other RNA
tcacatggaactcgtagatctcggtgaagcgccggtagaccaccttctccgacaggtcctgccatttcaccaggaacatgtatacctgggggaaagccagag

SEQ ID NO: 22857 - RNA, 102 nt, synthetic construct
  source 1..102: mol_type = other RNA
tcacatggaactcgtagatctcggtgaagcgccggtagaccaccttctccgacaggtcctgccatttcaccaggaacatgtaaacctgggggaaagccagag

SEQ ID NO: 22858 - RNA, 102 nt, synthetic construct
  source 1..102: mol_type = other RNA
tcacatggaactcgtagatctcggtgaagcgccggtagaccaccttctccgacaggtcctgccatttcaccaggaacatgtagacctgggggaaagccagag

SEQ ID NO: 22859 - RNA, 103 nt, synthetic construct
  source 1..103: mol_type = other RNA
ctcacatggaactcgtagatctcggtgaagcgccggtagaccaccttctccgacaggtcctgccatttcaccaggaacatgtacacctgggggaaagccagag

SEQ ID NO: 22860 - RNA, 103 nt, synthetic construct
  source 1..103: mol_type = other RNA
ctcacatggaactcgtagatctcggtgaagcgccggtagaccaccttctccgacaggtcctgccatttcaccaggaacatgtagacctgggggaaagccagag

SEQ ID NO: 22861 - RNA, 103 nt, synthetic construct
  source 1..103: mol_type = other RNA
ctcacatggaactcgtagatctcggtgaagcgccggtagaccaccttctccgacaggtcctgccatttcaccaggaacatgtaaacctgggggaaagccagag

SEQ ID NO: 22862 - RNA, 103 nt, synthetic construct
  source 1..103: mol_type = other RNA
ctcacatggaactcgtagatctcggtgaagcgccggtagaccaccttctccgacaggtcctgccatttcaccaggaacatgtatacctgggggaaagccagag

SEQ ID NO: 22863 - RNA, 16 nt, synthetic construct
  source 1..16: mol_type = other RNA
ctgggcttcctccagt

SEQ ID NO: 22864 - RNA, 17 nt, synthetic construct
  source 1..17: mol_type = other RNA
tctgggcttcctccagt

SEQ ID NO: 22865 - RNA, 18 nt, synthetic construct
  source 1..18: mol_type = other RNA
ctctgggcttcctccagt

SEQ ID NO: 22866 - RNA, 19 nt, synthetic construct
  source 1..19: mol_type = other RNA
cctctgggcttcctccagt

SEQ ID NO: 22867 - RNA, 20 nt, synthetic construct
  source 1..20: mol_type = other RNA
tcctctgggcttcctccagt

SEQ ID NO: 22868 - RNA, 21 nt, synthetic construct
  source 1..21: mol_type = other RNA
atcctctgggcttcctccagt

SEQ ID NO: 22869 - RNA, 22 nt, synthetic construct
  source 1..22: mol_type = other RNA
aatcctctgggcttcctccagt

SEQ ID NO: 22870-22874 - skipped (5 entries)

SEQ ID NO: 22875 - RNA, 10 nt, synthetic construct
  source 1..10: mol_type = other RNA
ggaggaagcc

SEQ ID NO: 22876 - RNA, 11 nt, synthetic construct
  source 1..11: mol_type = other RNA
ggaggaagccc

SEQ ID NO: 22877 - RNA, 12 nt, synthetic construct
  source 1..12: mol_type = other RNA
ggaggaagccca

SEQ ID NO: 22878 - RNA, 13 nt, synthetic construct
  source 1..13: mol_type = other RNA
ggaggaagcccag

SEQ ID NO: 22879 - RNA, 14 nt, synthetic construct
  source 1..14: mol_type = other RNA
ggaggaagcccaga

SEQ ID NO: 22880 - RNA, 15 nt, synthetic construct
  source 1..15: mol_type = other RNA
ggaggaagcccagag

SEQ ID NO: 22881 - RNA, 16 nt, synthetic construct
  source 1..16: mol_type = other RNA
ggaggaagcccagagg

SEQ ID NO: 22882 - RNA, 17 nt, synthetic construct
  source 1..17: mol_type = other RNA
ggaggaagcccagagga

SEQ ID NO: 22883 - RNA, 18 nt, synthetic construct
  source 1..18: mol_type = other RNA
ggaggaagcccagaggat

SEQ ID NO: 22884 - RNA, 19 nt, synthetic construct
  source 1..19: mol_type = other RNA
ggaggaagcccagaggatt

SEQ ID NO: 22885 - RNA, 84 nt, synthetic construct
  source 1..84: mol_type = other RNA
acctgggggaaagccagagtcgggggaccccattcagcctccaaagaggctttgctgtgtgcacccaggatcccactacccact

SEQ ID NO: 22886 - RNA, 85 nt, synthetic construct
  source 1..85: mol_type = other RNA
aacctgggggaaagccagagtcgggggaccccattcagcctccaaagaggctttgctgtgtgcacccaggatcccactacccact

SEQ ID NO: 22887 - RNA, 85 nt, synthetic construct
  source 1..85: mol_type = other RNA
tacctgggggaaagccagagtcgggggaccccattcagcctccaaagaggctttgctgtgtgcacccaggatcccactacccact

SEQ ID NO: 22888 - RNA, 85 nt, synthetic construct
  source 1..85: mol_type = other RNA
cacctgggggaaagccagagtcgggggaccccattcagcctccaaagaggctttgctgtgtgcacccaggatcccactacccact

SEQ ID NO: 22889 - RNA, 85 nt, synthetic construct
  source 1..85: mol_type = other RNA
gacctgggggaaagccagagtcgggggaccccattcagcctccaaagaggctttgctgtgtgcacccaggatcccactacccact

SEQ ID NO: 22890 - RNA, 86 nt, synthetic construct
  source 1..86: mol_type = other RNA
aaacctgggggaaagccagagtcgggggaccccattcagcctccaaagaggctttgctgtgtgcacccaggatcccactacccact

SEQ ID NO: 22891 - RNA, 86 nt, synthetic construct
  source 1..86: mol_type = other RNA
atacctgggggaaagccagagtcgggggaccccattcagcctccaaagaggctttgctgtgtgcacccaggatcccactacccact

SEQ ID NO: 22892 - RNA, 86 nt, synthetic construct
  source 1..86: mol_type = other RNA
acacctgggggaaagccagagtcgggggaccccattcagcctccaaagaggctttgctgtgtgcacccaggatcccactacccact

SEQ ID NO: 22893 - RNA, 86 nt, synthetic construct
  source 1..86: mol_type = other RNA
agacctgggggaaagccagagtcgggggaccccattcagcctccaaagaggctttgctgtgtgcacccaggatcccactacccact

SEQ ID NO: 22894 - RNA, 87 nt, synthetic construct
  source 1..87: mol_type = other RNA
tagacctgggggaaagccagagtcgggggaccccattcagcctccaaagaggctttgctgtgtgcacccaggatcccactacccact

SEQ ID NO: 22895 - RNA, 87 nt, synthetic construct
  source 1..87: mol_type = other RNA
tatacctgggggaaagccagagtcgggggaccccattcagcctccaaagaggctttgctgtgtgcacccaggatcccactacccact

SEQ ID NO: 22896 - RNA, 87 nt, synthetic construct
  source 1..87: mol_type = other RNA
tacacctgggggaaagccagagtcgggggaccccattcagcctccaaagaggctttgctgtgtgcacccaggatcccactacccact

SEQ ID NO: 22897 - RNA, 87 nt, synthetic construct
  source 1..87: mol_type = other RNA
taaacctgggggaaagccagagtcgggggaccccattcagcctccaaagaggctttgctgtgtgcacccaggatcccactacccact

SEQ ID NO: 22898 - RNA, 88 nt, synthetic construct
  source 1..88: mol_type = other RNA
gtacacctgggggaaagccagagtcgggggaccccattcagcctccaaagaggctttgctgtgtgcacccaggatcccactacccact

SEQ ID NO: 22899 - RNA, 88 nt, synthetic construct
  source 1..88: mol_type = other RNA
gtaaacctgggggaaagccagagtcgggggaccccattcagcctccaaagaggctttgctgtgtgcacccaggatcccactacccact

SEQ ID NO: 22900 - RNA, 88 nt, synthetic construct
  source 1..88: mol_type = other RNA
gtatacctgggggaaagccagagtcgggggaccccattcagcctccaaagaggctttgctgtgtgcacccaggatcccactacccact

SEQ ID NO: 22901 - RNA, 88 nt, synthetic construct
  source 1..88: mol_type = other RNA
gtagacctgggggaaagccagagtcgggggaccccattcagcctccaaagaggctttgctgtgtgcacccaggatcccactacccact

SEQ ID NO: 22902 - RNA, 89 nt, synthetic construct
  source 1..89: mol_type = other RNA
tgtagacctgggggaaagccagagtcgggggaccccattcagcctccaaagaggctttgctgtgtgcacccaggatcccactacccact

SEQ ID NO: 22903 - RNA, 89 nt, synthetic construct
  source 1..89: mol_type = other RNA
tgtaaacctgggggaaagccagagtcgggggaccccattcagcctccaaagaggctttgctgtgtgcacccaggatcccactacccact

SEQ ID NO: 22904 - RNA, 89 nt, synthetic construct
  source 1..89: mol_type = other RNA
tgtacacctgggggaaagccagagtcgggggaccccattcagcctccaaagaggctttgctgtgtgcacccaggatcccactacccact

SEQ ID NO: 22905 - RNA, 89 nt, synthetic construct
  source 1..89: mol_type = other RNA
tgtatacctgggggaaagccagagtcgggggaccccattcagcctccaaagaggctttgctgtgtgcacccaggatcccactacccact

SEQ ID NO: 22906 - RNA, 90 nt, synthetic construct
  source 1..90: mol_type = other RNA
atgtacacctgggggaaagccagagtcgggggaccccattcagcctccaaagaggctttgctgtgtgcacccaggatcccactacccact

SEQ ID NO: 22907 - RNA, 90 nt, synthetic construct
  source 1..90: mol_type = other RNA
atgtagacctgggggaaagccagagtcgggggaccccattcagcctccaaagaggctttgctgtgtgcacccaggatcccactacccact

SEQ ID NO: 22908 - RNA, 90 nt, synthetic construct
  source 1..90: mol_type = other RNA
atgtaaacctgggggaaagccagagtcgggggaccccattcagcctccaaagaggctttgctgtgtgcacccaggatcccactacccact

SEQ ID NO: 22909 - RNA, 90 nt, synthetic construct
  source 1..90: mol_type = other RNA
atgtatacctgggggaaagccagagtcgggggaccccattcagcctccaaagaggctttgctgtgtgcacccaggatcccactacccact

SEQ ID NO: 22910 - RNA, 91 nt, synthetic construct
  source 1..91: mol_type = other RNA
catgtatacctgggggaaagccagagtcgggggaccccattcagcctccaaagaggctttgctgtgtgcacccaggatcccactacccact

SEQ ID NO: 22911 - RNA, 91 nt, synthetic construct
  source 1..91: mol_type = other RNA
catgtacacctgggggaaagccagagtcgggggaccccattcagcctccaaagaggctttgctgtgtgcacccaggatcccactacccact

SEQ ID NO: 22912 - RNA, 91 nt, synthetic construct
  source 1..91: mol_type = other RNA
catgtagacctgggggaaagccagagtcgggggaccccattcagcctccaaagaggctttgctgtgtgcacccaggatcccactacccact

SEQ ID NO: 22913 - RNA, 91 nt, synthetic construct
  source 1..91: mol_type = other RNA
catgtaaacctgggggaaagccagagtcgggggaccccattcagcctccaaagaggctttgctgtgtgcacccaggatcccactacccact

SEQ ID NO: 22914 - RNA, 92 nt, synthetic construct
  source 1..92: mol_type = other RNA
acatgtatacctgggggaaagccagagtcgggggaccccattcagcctccaaagaggctttgctgtgtgcacccaggatcccactacccact

SEQ ID NO: 22915 - RNA, 92 nt, synthetic construct
  source 1..92: mol_type = other RNA
acatgtagacctgggggaaagccagagtcgggggaccccattcagcctccaaagaggctttgctgtgtgcacccaggatcccactacccact

SEQ ID NO: 22916 - RNA, 92 nt, synthetic construct
  source 1..92: mol_type = other RNA
acatgtacacctgggggaaagccagagtcgggggaccccattcagcctccaaagaggctttgctgtgtgcacccaggatcccactacccact

SEQ ID NO: 22917 - RNA, 92 nt, synthetic construct
  source 1..92: mol_type = other RNA
acatgtaaacctgggggaaagccagagtcgggggaccccattcagcctccaaagaggctttgctgtgtgcacccaggatcccactacccact

SEQ ID NO: 22918 - RNA, 93 nt, synthetic construct
  source 1..93: mol_type = other RNA
aacatgtagacctgggggaaagccagagtcgggggaccccattcagcctccaaagaggctttgctgtgtgcacccaggatcccactacccact

SEQ ID NO: 22919 - RNA, 93 nt, synthetic construct
  source 1..93: mol_type = other RNA
aacatgtatacctgggggaaagccagagtcgggggaccccattcagcctccaaagaggctttgctgtgtgcacccaggatcccactacccact

SEQ ID NO: 22920 - RNA, 93 nt, synthetic construct
  source 1..93: mol_type = other RNA
aacatgtacacctgggggaaagccagagtcgggggaccccattcagcctccaaagaggctttgctgtgtgcacccaggatcccactacccact

SEQ ID NO: 22921 - RNA, 93 nt, synthetic construct
  source 1..93: mol_type = other RNA
aacatgtaaacctgggggaaagccagagtcgggggaccccattcagcctccaaagaggctttgctgtgtgcacccaggatcccactacccact

SEQ ID NO: 22922 - RNA, 94 nt, synthetic construct
  source 1..94: mol_type = other RNA
gaacatgtaaacctgggggaaagccagagtcgggggaccccattcagcctccaaagaggctttgctgtgtgcacccaggatcccactacccact

SEQ ID NO: 22923 - RNA, 94 nt, synthetic construct
  source 1..94: mol_type = other RNA
gaacatgtagacctgggggaaagccagagtcgggggaccccattcagcctccaaagaggctttgctgtgtgcacccaggatcccactacccact

SEQ ID NO: 22924 - RNA, 94 nt, synthetic construct
  source 1..94: mol_type = other RNA
gaacatgtatacctgggggaaagccagagtcgggggaccccattcagcctccaaagaggctttgctgtgtgcacccaggatcccactacccact

SEQ ID NO: 22925 - RNA, 94 nt, synthetic construct
  source 1..94: mol_type = other RNA
gaacatgtacacctgggggaaagccagagtcgggggaccccattcagcctccaaagaggctttgctgtgtgcacccaggatcccactacccact

SEQ ID NO: 22926 - RNA, 95 nt, synthetic construct
  source 1..95: mol_type = other RNA
ggaacatgtacacctgggggaaagccagagtcgggggaccccattcagcctccaaagaggctttgctgtgtgcacccaggatcccactacccact

SEQ ID NO: 22927 - RNA, 95 nt, synthetic construct
  source 1..95: mol_type = other RNA
ggaacatgtagacctgggggaaagccagagtcgggggaccccattcagcctccaaagaggctttgctgtgtgcacccaggatcccactacccact

SEQ ID NO: 22928 - RNA, 95 nt, synthetic construct
  source 1..95: mol_type = other RNA
ggaacatgtatacctgggggaaagccagagtcgggggaccccattcagcctccaaagaggctttgctgtgtgcacccaggatcccactacccact

SEQ ID NO: 22929 - RNA, 95 nt, synthetic construct
  source 1..95: mol_type = other RNA
ggaacatgtaaacctgggggaaagccagagtcgggggaccccattcagcctccaaagaggctttgctgtgtgcacccaggatcccactacccact

SEQ ID NO: 22930 - RNA, 96 nt, synthetic construct
  source 1..96: mol_type = other RNA
aggaacatgtaaacctgggggaaagccagagtcgggggaccccattcagcctccaaagaggctttgctgtgtgcacccaggatcccactacccact

SEQ ID NO: 22931 - RNA, 96 nt, synthetic construct
  source 1..96: mol_type = other RNA
aggaacatgtatacctgggggaaagccagagtcgggggaccccattcagcctccaaagaggctttgctgtgtgcacccaggatcccactacccact

SEQ ID NO: 22932 - RNA, 96 nt, synthetic construct
  source 1..96: mol_type = other RNA
aggaacatgtagacctgggggaaagccagagtcgggggaccccattcagcctccaaagaggctttgctgtgtgcacccaggatcccactacccact

SEQ ID NO: 22933 - RNA, 96 nt, synthetic construct
  source 1..96: mol_type = other RNA
aggaacatgtacacctgggggaaagccagagtcgggggaccccattcagcctccaaagaggctttgctgtgtgcacccaggatcccactacccact

SEQ ID NO: 22934 - RNA, 97 nt, synthetic construct
  source 1..97: mol_type = other RNA
caggaacatgtatacctgggggaaagccagagtcgggggaccccattcagcctccaaagaggctttgctgtgtgcacccaggatcccactacccact

SEQ ID NO: 22935 - RNA, 97 nt, synthetic construct
  source 1..97: mol_type = other RNA
caggaacatgtagacctgggggaaagccagagtcgggggaccccattcagcctccaaagaggctttgctgtgtgcacccaggatcccactacccact

SEQ ID NO: 22936 - RNA, 97 nt, synthetic construct
  source 1..97: mol_type = other RNA
caggaacatgtacacctgggggaaagccagagtcgggggaccccattcagcctccaaagaggctttgctgtgtgcacccaggatcccactacccact

SEQ ID NO: 22937 - RNA, 97 nt, synthetic construct
  source 1..97: mol_type = other RNA
caggaacatgtaaacctgggggaaagccagagtcgggggaccccattcagcctccaaagaggctttgctgtgtgcacccaggatcccactacccact

SEQ ID NO: 22938 - RNA, 98 nt, synthetic construct
  source 1..98: mol_type = other RNA
ccaggaacatgtacacctgggggaaagccagagtcgggggaccccattcagcctccaaagaggctttgctgtgtgcacccaggatcccactacccact

SEQ ID NO: 22939 - RNA, 98 nt, synthetic construct
  source 1..98: mol_type = other RNA
ccaggaacatgtagacctgggggaaagccagagtcgggggaccccattcagcctccaaagaggctttgctgtgtgcacccaggatcccactacccact

SEQ ID NO: 22940 - RNA, 98 nt, synthetic construct
  source 1..98: mol_type = other RNA
ccaggaacatgtatacctgggggaaagccagagtcgggggaccccattcagcctccaaagaggctttgctgtgtgcacccaggatcccactacccact

SEQ ID NO: 22941 - RNA, 98 nt, synthetic construct
  source 1..98: mol_type = other RNA
ccaggaacatgtaaacctgggggaaagccagagtcgggggaccccattcagcctccaaagaggctttgctgtgtgcacccaggatcccactacccact

SEQ ID NO: 22942 - RNA, 99 nt, synthetic construct
  source 1..99: mol_type = other RNA
accaggaacatgtaaacctgggggaaagccagagtcgggggaccccattcagcctccaaagaggctttgctgtgtgcacccaggatcccactacccact

SEQ ID NO: 22943 - RNA, 99 nt, synthetic construct
  source 1..99: mol_type = other RNA
accaggaacatgtacacctgggggaaagccagagtcgggggaccccattcagcctccaaagaggctttgctgtgtgcacccaggatcccactacccact

SEQ ID NO: 22944 - RNA, 99 nt, synthetic construct
  source 1..99: mol_type = other RNA
accaggaacatgtatacctgggggaaagccagagtcgggggaccccattcagcctccaaagaggctttgctgtgtgcacccaggatcccactacccact

SEQ ID NO: 22945 - RNA, 99 nt, synthetic construct
  source 1..99: mol_type = other RNA
accaggaacatgtagacctgggggaaagccagagtcgggggaccccattcagcctccaaagaggctttgctgtgtgcacccaggatcccactacccact

SEQ ID NO: 22946 - RNA, 100 nt, synthetic construct
  source 1..100: mol_type = other RNA
caccaggaacatgtatacctgggggaaagccagagtcgggggaccccattcagcctccaaagaggctttgctgtgtgcacccaggatcccactacccact

SEQ ID NO: 22947 - RNA, 100 nt, synthetic construct
  source 1..100: mol_type = other RNA
caccaggaacatgtaaacctgggggaaagccagagtcgggggaccccattcagcctccaaagaggctttgctgtgtgcacccaggatcccactacccact

SEQ ID NO: 22948 - RNA, 100 nt, synthetic construct
  source 1..100: mol_type = other RNA
caccaggaacatgtacacctgggggaaagccagagtcgggggaccccattcagcctccaaagaggctttgctgtgtgcacccaggatcccactacccact

SEQ ID NO: 22949 - RNA, 100 nt, synthetic construct
  source 1..100: mol_type = other RNA
caccaggaacatgtagacctgggggaaagccagagtcgggggaccccattcagcctccaaagaggctttgctgtgtgcacccaggatcccactacccact

SEQ ID NO: 22950 - RNA, 101 nt, synthetic construct
  source 1..101: mol_type = other RNA
tcaccaggaacatgtagacctgggggaaagccagagtcgggggaccccattcagcctccaaagaggctttgctgtgtgcacccaggatcccactacccact

SEQ ID NO: 22951 - RNA, 101 nt, synthetic construct
  source 1..101: mol_type = other RNA
tcaccaggaacatgtaaacctgggggaaagccagagtcgggggaccccattcagcctccaaagaggctttgctgtgtgcacccaggatcccactacccact

SEQ ID NO: 22952 - RNA, 101 nt, synthetic construct
  source 1..101: mol_type = other RNA
tcaccaggaacatgtacacctgggggaaagccagagtcgggggaccccattcagcctccaaagaggctttgctgtgtgcacccaggatcccactacccact

SEQ ID NO: 22953 - RNA, 101 nt, synthetic construct
  source 1..101: mol_type = other RNA
tcaccaggaacatgtatacctgggggaaagccagagtcgggggaccccattcagcctccaaagaggctttgctgtgtgcacccaggatcccactacccact

SEQ ID NO: 22954 - RNA, 102 nt, synthetic construct
  source 1..102: mol_type = other RNA
ttcaccaggaacatgtaaacctgggggaaagccagagtcgggggaccccattcagcctccaaagaggctttgctgtgtgcacccaggatcccactacccact

SEQ ID NO: 22955 - RNA, 102 nt, synthetic construct
  source 1..102: mol_type = other RNA
ttcaccaggaacatgtacacctgggggaaagccagagtcgggggaccccattcagcctccaaagaggctttgctgtgtgcacccaggatcccactacccact

SEQ ID NO: 22956 - RNA, 102 nt, synthetic construct
  source 1..102: mol_type = other RNA
ttcaccaggaacatgtagacctgggggaaagccagagtcgggggaccccattcagcctccaaagaggctttgctgtgtgcacccaggatcccactacccact

SEQ ID NO: 22957 - RNA, 102 nt, synthetic construct
  source 1..102: mol_type = other RNA
ttcaccaggaacatgtatacctgggggaaagccagagtcgggggaccccattcagcctccaaagaggctttgctgtgtgcacccaggatcccactacccact

SEQ ID NO: 22958 - RNA, 103 nt, synthetic construct
  source 1..103: mol_type = other RNA
tttcaccaggaacatgtaaacctgggggaaagccagagtcgggggaccccattcagcctccaaagaggctttgctgtgtgcacccaggatcccactacccact

SEQ ID NO: 22959 - RNA, 103 nt, synthetic construct
  source 1..103: mol_type = other RNA
tttcaccaggaacatgtacacctgggggaaagccagagtcgggggaccccattcagcctccaaagaggctttgctgtgtgcacccaggatcccactacccact

SEQ ID NO: 22960 - RNA, 103 nt, synthetic construct
  source 1..103: mol_type = other RNA
tttcaccaggaacatgtagacctgggggaaagccagagtcgggggaccccattcagcctccaaagaggctttgctgtgtgcacccaggatcccactacccact

SEQ ID NO: 22961 - RNA, 103 nt, synthetic construct
  source 1..103: mol_type = other RNA
tttcaccaggaacatgtatacctgggggaaagccagagtcgggggaccccattcagcctccaaagaggctttgctgtgtgcacccaggatcccactacccact

SEQ ID NO: 22962 - RNA, 16 nt, synthetic construct
  source 1..16: mol_type = other RNA
acagcaaagcctcttt

SEQ ID NO: 22963 - RNA, 17 nt, synthetic construct
  source 1..17: mol_type = other RNA
cacagcaaagcctcttt

SEQ ID NO: 22964 - RNA, 18 nt, synthetic construct
  source 1..18: mol_type = other RNA
acacagcaaagcctcttt

SEQ ID NO: 22965 - RNA, 19 nt, synthetic construct
  source 1..19: mol_type = other RNA
cacacagcaaagcctcttt

SEQ ID NO: 22966 - RNA, 20 nt, synthetic construct
  source 1..20: mol_type = other RNA
gcacacagcaaagcctcttt

SEQ ID NO: 22967 - RNA, 21 nt, synthetic construct
  source 1..21: mol_type = other RNA
tgcacacagcaaagcctcttt

SEQ ID NO: 22968 - RNA, 22 nt, synthetic construct
  source 1..22: mol_type = other RNA
gtgcacacagcaaagcctcttt

SEQ ID NO: 22969-22973 - skipped (5 entries)

SEQ ID NO: 22974 - RNA, 10 nt, synthetic construct
  source 1..10: mol_type = other RNA
gaggctttgc

SEQ ID NO: 22975 - RNA, 11 nt, synthetic construct
  source 1..11: mol_type = other RNA
gaggctttgct

SEQ ID NO: 22976 - RNA, 12 nt, synthetic construct
  source 1..12: mol_type = other RNA
gaggctttgctg

SEQ ID NO: 22977 - RNA, 13 nt, synthetic construct
  source 1..13: mol_type = other RNA
gaggctttgctgt

SEQ ID NO: 22978 - RNA, 14 nt, synthetic construct
  source 1..14: mol_type = other RNA
gaggctttgctgtg

SEQ ID NO: 22979 - RNA, 15 nt, synthetic construct
  source 1..15: mol_type = other RNA
gaggctttgctgtgt

SEQ ID NO: 22980 - RNA, 16 nt, synthetic construct
  source 1..16: mol_type = other RNA
gaggctttgctgtgtg

SEQ ID NO: 22981 - RNA, 17 nt, synthetic construct
  source 1..17: mol_type = other RNA
gaggctttgctgtgtgc

SEQ ID NO: 22982 - RNA, 18 nt, synthetic construct
  source 1..18: mol_type = other RNA
gaggctttgctgtgtgca

SEQ ID NO: 22983 - RNA, 19 nt, synthetic construct
  source 1..19: mol_type = other RNA
gaggctttgctgtgtgcac

SEQ ID NO: 22984 - RNA, 45 nt, synthetic construct
  source 1..45: mol_type = other RNA
acctgggggaaagccagagtcgggggaccccattcagcctccaaa

SEQ ID NO: 22985 - RNA, 46 nt, synthetic construct
  source 1..46: mol_type = other RNA
tacctgggggaaagccagagtcgggggaccccattcagcctccaaa

SEQ ID NO: 22986 - RNA, 46 nt, synthetic construct
  source 1..46: mol_type = other RNA
aacctgggggaaagccagagtcgggggaccccattcagcctccaaa

SEQ ID NO: 22987 - RNA, 46 nt, synthetic construct
  source 1..46: mol_type = other RNA
cacctgggggaaagccagagtcgggggaccccattcagcctccaaa

SEQ ID NO: 22988 - RNA, 46 nt, synthetic construct
  source 1..46: mol_type = other RNA
gacctgggggaaagccagagtcgggggaccccattcagcctccaaa

SEQ ID NO: 22989 - RNA, 47 nt, synthetic construct
  source 1..47: mol_type = other RNA
agacctgggggaaagccagagtcgggggaccccattcagcctccaaa

SEQ ID NO: 22990 - RNA, 47 nt, synthetic construct
  source 1..47: mol_type = other RNA
acacctgggggaaagccagagtcgggggaccccattcagcctccaaa

SEQ ID NO: 22991 - RNA, 47 nt, synthetic construct
  source 1..47: mol_type = other RNA
atacctgggggaaagccagagtcgggggaccccattcagcctccaaa

SEQ ID NO: 22992 - RNA, 47 nt, synthetic construct
  source 1..47: mol_type = other RNA
aaacctgggggaaagccagagtcgggggaccccattcagcctccaaa

SEQ ID NO: 22993 - RNA, 48 nt, synthetic construct
  source 1..48: mol_type = other RNA
tagacctgggggaaagccagagtcgggggaccccattcagcctccaaa

SEQ ID NO: 22994 - RNA, 48 nt, synthetic construct
  source 1..48: mol_type = other RNA
tacacctgggggaaagccagagtcgggggaccccattcagcctccaaa

SEQ ID NO: 22995 - RNA, 48 nt, synthetic construct
  source 1..48: mol_type = other RNA
taaacctgggggaaagccagagtcgggggaccccattcagcctccaaa

SEQ ID NO: 22996 - RNA, 48 nt, synthetic construct
  source 1..48: mol_type = other RNA
tatacctgggggaaagccagagtcgggggaccccattcagcctccaaa

SEQ ID NO: 22997 - RNA, 49 nt, synthetic construct
  source 1..49: mol_type = other RNA
gtagacctgggggaaagccagagtcgggggaccccattcagcctccaaa

SEQ ID NO: 22998 - RNA, 49 nt, synthetic construct
  source 1..49: mol_type = other RNA
gtacacctgggggaaagccagagtcgggggaccccattcagcctccaaa

SEQ ID NO: 22999 - RNA, 49 nt, synthetic construct
  source 1..49: mol_type = other RNA
gtatacctgggggaaagccagagtcgggggaccccattcagcctccaaa

SEQ ID NO: 23000 - RNA, 49 nt, synthetic construct
  source 1..49: mol_type = other RNA
gtaaacctgggggaaagccagagtcgggggaccccattcagcctccaaa

SEQ ID NO: 23001 - RNA, 50 nt, synthetic construct
  source 1..50: mol_type = other RNA
tgtaaacctgggggaaagccagagtcgggggaccccattcagcctccaaa

SEQ ID NO: 23002 - RNA, 50 nt, synthetic construct
  source 1..50: mol_type = other RNA
tgtatacctgggggaaagccagagtcgggggaccccattcagcctccaaa

SEQ ID NO: 23003 - RNA, 50 nt, synthetic construct
  source 1..50: mol_type = other RNA
tgtacacctgggggaaagccagagtcgggggaccccattcagcctccaaa

SEQ ID NO: 23004 - RNA, 50 nt, synthetic construct
  source 1..50: mol_type = other RNA
tgtagacctgggggaaagccagagtcgggggaccccattcagcctccaaa

SEQ ID NO: 23005 - RNA, 51 nt, synthetic construct
  source 1..51: mol_type = other RNA
atgtagacctgggggaaagccagagtcgggggaccccattcagcctccaaa

SEQ ID NO: 23006 - RNA, 51 nt, synthetic construct
  source 1..51: mol_type = other RNA
atgtacacctgggggaaagccagagtcgggggaccccattcagcctccaaa

SEQ ID NO: 23007 - RNA, 51 nt, synthetic construct
  source 1..51: mol_type = other RNA
atgtaaacctgggggaaagccagagtcgggggaccccattcagcctccaaa

SEQ ID NO: 23008 - RNA, 51 nt, synthetic construct
  source 1..51: mol_type = other RNA
atgtatacctgggggaaagccagagtcgggggaccccattcagcctccaaa

SEQ ID NO: 23009 - RNA, 52 nt, synthetic construct
  source 1..52: mol_type = other RNA
catgtaaacctgggggaaagccagagtcgggggaccccattcagcctccaaa

SEQ ID NO: 23010 - RNA, 52 nt, synthetic construct
  source 1..52: mol_type = other RNA
catgtagacctgggggaaagccagagtcgggggaccccattcagcctccaaa

SEQ ID NO: 23011 - RNA, 52 nt, synthetic construct
  source 1..52: mol_type = other RNA
catgtatacctgggggaaagccagagtcgggggaccccattcagcctccaaa

SEQ ID NO: 23012 - RNA, 52 nt, synthetic construct
  source 1..52: mol_type = other RNA
catgtacacctgggggaaagccagagtcgggggaccccattcagcctccaaa

SEQ ID NO: 23013 - RNA, 53 nt, synthetic construct
  source 1..53: mol_type = other RNA
acatgtacacctgggggaaagccagagtcgggggaccccattcagcctccaaa

SEQ ID NO: 23014 - RNA, 53 nt, synthetic construct
  source 1..53: mol_type = other RNA
acatgtagacctgggggaaagccagagtcgggggaccccattcagcctccaaa

SEQ ID NO: 23015 - RNA, 53 nt, synthetic construct
  source 1..53: mol_type = other RNA
acatgtaaacctgggggaaagccagagtcgggggaccccattcagcctccaaa

SEQ ID NO: 23016 - RNA, 53 nt, synthetic construct
  source 1..53: mol_type = other RNA
acatgtatacctgggggaaagccagagtcgggggaccccattcagcctccaaa

SEQ ID NO: 23017 - RNA, 54 nt, synthetic construct
  source 1..54: mol_type = other RNA
aacatgtaaacctgggggaaagccagagtcgggggaccccattcagcctccaaa

SEQ ID NO: 23018 - RNA, 54 nt, synthetic construct
  source 1..54: mol_type = other RNA
aacatgtacacctgggggaaagccagagtcgggggaccccattcagcctccaaa

SEQ ID NO: 23019 - RNA, 54 nt, synthetic construct
  source 1..54: mol_type = other RNA
aacatgtatacctgggggaaagccagagtcgggggaccccattcagcctccaaa

SEQ ID NO: 23020 - RNA, 54 nt, synthetic construct
  source 1..54: mol_type = other RNA
aacatgtagacctgggggaaagccagagtcgggggaccccattcagcctccaaa

SEQ ID NO: 23021 - RNA, 55 nt, synthetic construct
  source 1..55: mol_type = other RNA
gaacatgtatacctgggggaaagccagagtcgggggaccccattcagcctccaaa

SEQ ID NO: 23022 - RNA, 55 nt, synthetic construct
  source 1..55: mol_type = other RNA
gaacatgtagacctgggggaaagccagagtcgggggaccccattcagcctccaaa

SEQ ID NO: 23023 - RNA, 55 nt, synthetic construct
  source 1..55: mol_type = other RNA
gaacatgtaaacctgggggaaagccagagtcgggggaccccattcagcctccaaa

SEQ ID NO: 23024 - RNA, 55 nt, synthetic construct
  source 1..55: mol_type = other RNA
gaacatgtacacctgggggaaagccagagtcgggggaccccattcagcctccaaa

SEQ ID NO: 23025 - RNA, 56 nt, synthetic construct
  source 1..56: mol_type = other RNA
ggaacatgtagacctgggggaaagccagagtcgggggaccccattcagcctccaaa

SEQ ID NO: 23026 - RNA, 56 nt, synthetic construct
  source 1..56: mol_type = other RNA
ggaacatgtatacctgggggaaagccagagtcgggggaccccattcagcctccaaa

SEQ ID NO: 23027 - RNA, 56 nt, synthetic construct
  source 1..56: mol_type = other RNA
ggaacatgtacacctgggggaaagccagagtcgggggaccccattcagcctccaaa

SEQ ID NO: 23028 - RNA, 56 nt, synthetic construct
  source 1..56: mol_type = other RNA
ggaacatgtaaacctgggggaaagccagagtcgggggaccccattcagcctccaaa

SEQ ID NO: 23029 - RNA, 57 nt, synthetic construct
  source 1..57: mol_type = other RNA
aggaacatgtatacctgggggaaagccagagtcgggggaccccattcagcctccaaa

SEQ ID NO: 23030 - RNA, 57 nt, synthetic construct
  source 1..57: mol_type = other RNA
aggaacatgtagacctgggggaaagccagagtcgggggaccccattcagcctccaaa

SEQ ID NO: 23031 - RNA, 57 nt, synthetic construct
  source 1..57: mol_type = other RNA
aggaacatgtaaacctgggggaaagccagagtcgggggaccccattcagcctccaaa

SEQ ID NO: 23032 - RNA, 57 nt, synthetic construct
  source 1..57: mol_type = other RNA
aggaacatgtacacctgggggaaagccagagtcgggggaccccattcagcctccaaa

SEQ ID NO: 23033 - RNA, 58 nt, synthetic construct
  source 1..58: mol_type = other RNA
caggaacatgtatacctgggggaaagccagagtcgggggaccccattcagcctccaaa

SEQ ID NO: 23034 - RNA, 58 nt, synthetic construct
  source 1..58: mol_type = other RNA
caggaacatgtagacctgggggaaagccagagtcgggggaccccattcagcctccaaa

SEQ ID NO: 23035 - RNA, 58 nt, synthetic construct
  source 1..58: mol_type = other RNA
caggaacatgtacacctgggggaaagccagagtcgggggaccccattcagcctccaaa

SEQ ID NO: 23036 - RNA, 58 nt, synthetic construct
  source 1..58: mol_type = other RNA
caggaacatgtaaacctgggggaaagccagagtcgggggaccccattcagcctccaaa

SEQ ID NO: 23037 - RNA, 59 nt, synthetic construct
  source 1..59: mol_type = other RNA
ccaggaacatgtatacctgggggaaagccagagtcgggggaccccattcagcctccaaa

SEQ ID NO: 23038 - RNA, 59 nt, synthetic construct
  source 1..59: mol_type = other RNA
ccaggaacatgtacacctgggggaaagccagagtcgggggaccccattcagcctccaaa

SEQ ID NO: 23039 - RNA, 59 nt, synthetic construct
  source 1..59: mol_type = other RNA
ccaggaacatgtaaacctgggggaaagccagagtcgggggaccccattcagcctccaaa

SEQ ID NO: 23040 - RNA, 59 nt, synthetic construct
  source 1..59: mol_type = other RNA
ccaggaacatgtagacctgggggaaagccagagtcgggggaccccattcagcctccaaa

SEQ ID NO: 23041 - RNA, 60 nt, synthetic construct
  source 1..60: mol_type = other RNA
accaggaacatgtatacctgggggaaagccagagtcgggggaccccattcagcctccaaa

SEQ ID NO: 23042 - RNA, 60 nt, synthetic construct
  source 1..60: mol_type = other RNA
accaggaacatgtagacctgggggaaagccagagtcgggggaccccattcagcctccaaa

SEQ ID NO: 23043 - RNA, 60 nt, synthetic construct
  source 1..60: mol_type = other RNA
accaggaacatgtacacctgggggaaagccagagtcgggggaccccattcagcctccaaa

SEQ ID NO: 23044 - RNA, 60 nt, synthetic construct
  source 1..60: mol_type = other RNA
accaggaacatgtaaacctgggggaaagccagagtcgggggaccccattcagcctccaaa

SEQ ID NO: 23045 - RNA, 61 nt, synthetic construct
  source 1..61: mol_type = other RNA
caccaggaacatgtaaacctgggggaaagccagagtcgggggaccccattcagcctccaaa

SEQ ID NO: 23046 - RNA, 61 nt, synthetic construct
  source 1..61: mol_type = other RNA
caccaggaacatgtacacctgggggaaagccagagtcgggggaccccattcagcctccaaa

SEQ ID NO: 23047 - RNA, 61 nt, synthetic construct
  source 1..61: mol_type = other RNA
caccaggaacatgtagacctgggggaaagccagagtcgggggaccccattcagcctccaaa

SEQ ID NO: 23048 - RNA, 61 nt, synthetic construct
  source 1..61: mol_type = other RNA
caccaggaacatgtatacctgggggaaagccagagtcgggggaccccattcagcctccaaa

SEQ ID NO: 23049 - RNA, 62 nt, synthetic construct
  source 1..62: mol_type = other RNA
tcaccaggaacatgtagacctgggggaaagccagagtcgggggaccccattcagcctccaaa

SEQ ID NO: 23050 - RNA, 62 nt, synthetic construct
  source 1..62: mol_type = other RNA
tcaccaggaacatgtatacctgggggaaagccagagtcgggggaccccattcagcctccaaa

SEQ ID NO: 23051 - RNA, 62 nt, synthetic construct
  source 1..62: mol_type = other RNA
tcaccaggaacatgtacacctgggggaaagccagagtcgggggaccccattcagcctccaaa

SEQ ID NO: 23052 - RNA, 62 nt, synthetic construct
  source 1..62: mol_type = other RNA
tcaccaggaacatgtaaacctgggggaaagccagagtcgggggaccccattcagcctccaaa

SEQ ID NO: 23053 - RNA, 63 nt, synthetic construct
  source 1..63: mol_type = other RNA
ttcaccaggaacatgtacacctgggggaaagccagagtcgggggaccccattcagcctccaaa

SEQ ID NO: 23054 - RNA, 63 nt, synthetic construct
  source 1..63: mol_type = other RNA
ttcaccaggaacatgtatacctgggggaaagccagagtcgggggaccccattcagcctccaaa

SEQ ID NO: 23055 - RNA, 63 nt, synthetic construct
  source 1..63: mol_type = other RNA
ttcaccaggaacatgtagacctgggggaaagccagagtcgggggaccccattcagcctccaaa

SEQ ID NO: 23056 - RNA, 63 nt, synthetic construct
  source 1..63: mol_type = other RNA
ttcaccaggaacatgtaaacctgggggaaagccagagtcgggggaccccattcagcctccaaa

SEQ ID NO: 23057 - RNA, 64 nt, synthetic construct
  source 1..64: mol_type = other RNA
tttcaccaggaacatgtaaacctgggggaaagccagagtcgggggaccccattcagcctccaaa

SEQ ID NO: 23058 - RNA, 64 nt, synthetic construct
  source 1..64: mol_type = other RNA
tttcaccaggaacatgtagacctgggggaaagccagagtcgggggaccccattcagcctccaaa

SEQ ID NO: 23059 - RNA, 64 nt, synthetic construct
  source 1..64: mol_type = other RNA
tttcaccaggaacatgtacacctgggggaaagccagagtcgggggaccccattcagcctccaaa

SEQ ID NO: 23060 - RNA, 64 nt, synthetic construct
  source 1..64: mol_type = other RNA
tttcaccaggaacatgtatacctgggggaaagccagagtcgggggaccccattcagcctccaaa

SEQ ID NO: 23061 - RNA, 65 nt, synthetic construct
  source 1..65: mol_type = other RNA
atttcaccaggaacatgtaaacctgggggaaagccagagtcgggggaccccattcagcctccaaa

SEQ ID NO: 23062 - RNA, 65 nt, synthetic construct
  source 1..65: mol_type = other RNA
atttcaccaggaacatgtagacctgggggaaagccagagtcgggggaccccattcagcctccaaa

SEQ ID NO: 23063 - RNA, 65 nt, synthetic construct
  source 1..65: mol_type = other RNA
atttcaccaggaacatgtacacctgggggaaagccagagtcgggggaccccattcagcctccaaa

SEQ ID NO: 23064 - RNA, 65 nt, synthetic construct
  source 1..65: mol_type = other RNA
atttcaccaggaacatgtatacctgggggaaagccagagtcgggggaccccattcagcctccaaa

SEQ ID NO: 23065 - RNA, 66 nt, synthetic construct
  source 1..66: mol_type = other RNA
catttcaccaggaacatgtacacctgggggaaagccagagtcgggggaccccattcagcctccaaa

SEQ ID NO: 23066 - RNA, 66 nt, synthetic construct
  source 1..66: mol_type = other RNA
catttcaccaggaacatgtatacctgggggaaagccagagtcgggggaccccattcagcctccaaa

SEQ ID NO: 23067 - RNA, 66 nt, synthetic construct
  source 1..66: mol_type = other RNA
catttcaccaggaacatgtagacctgggggaaagccagagtcgggggaccccattcagcctccaaa

SEQ ID NO: 23068 - RNA, 66 nt, synthetic construct
  source 1..66: mol_type = other RNA
catttcaccaggaacatgtaaacctgggggaaagccagagtcgggggaccccattcagcctccaaa

SEQ ID NO: 23069 - RNA, 67 nt, synthetic construct
  source 1..67: mol_type = other RNA
ccatttcaccaggaacatgtaaacctgggggaaagccagagtcgggggaccccattcagcctccaaa

SEQ ID NO: 23070 - RNA, 67 nt, synthetic construct
  source 1..67: mol_type = other RNA
ccatttcaccaggaacatgtatacctgggggaaagccagagtcgggggaccccattcagcctccaaa

SEQ ID NO: 23071 - RNA, 67 nt, synthetic construct
  source 1..67: mol_type = other RNA
ccatttcaccaggaacatgtacacctgggggaaagccagagtcgggggaccccattcagcctccaaa

SEQ ID NO: 23072 - RNA, 67 nt, synthetic construct
  source 1..67: mol_type = other RNA
ccatttcaccaggaacatgtagacctgggggaaagccagagtcgggggaccccattcagcctccaaa

SEQ ID NO: 23073 - RNA, 68 nt, synthetic construct
  source 1..68: mol_type = other RNA
gccatttcaccaggaacatgtatacctgggggaaagccagagtcgggggaccccattcagcctccaaa

SEQ ID NO: 23074 - RNA, 68 nt, synthetic construct
  source 1..68: mol_type = other RNA
gccatttcaccaggaacatgtacacctgggggaaagccagagtcgggggaccccattcagcctccaaa

SEQ ID NO: 23075 - RNA, 68 nt, synthetic construct
  source 1..68: mol_type = other RNA
gccatttcaccaggaacatgtaaacctgggggaaagccagagtcgggggaccccattcagcctccaaa

SEQ ID NO: 23076 - RNA, 68 nt, synthetic construct
  source 1..68: mol_type = other RNA
gccatttcaccaggaacatgtagacctgggggaaagccagagtcgggggaccccattcagcctccaaa

SEQ ID NO: 23077 - RNA, 69 nt, synthetic construct
  source 1..69: mol_type = other RNA
tgccatttcaccaggaacatgtatacctgggggaaagccagagtcgggggaccccattcagcctccaaa

SEQ ID NO: 23078 - RNA, 69 nt, synthetic construct
  source 1..69: mol_type = other RNA
tgccatttcaccaggaacatgtacacctgggggaaagccagagtcgggggaccccattcagcctccaaa

SEQ ID NO: 23079 - RNA, 69 nt, synthetic construct
  source 1..69: mol_type = other RNA
tgccatttcaccaggaacatgtagacctgggggaaagccagagtcgggggaccccattcagcctccaaa

SEQ ID NO: 23080 - RNA, 69 nt, synthetic construct
  source 1..69: mol_type = other RNA
tgccatttcaccaggaacatgtaaacctgggggaaagccagagtcgggggaccccattcagcctccaaa

SEQ ID NO: 23081 - RNA, 70 nt, synthetic construct
  source 1..70: mol_type = other RNA
ctgccatttcaccaggaacatgtacacctgggggaaagccagagtcgggggaccccattcagcctccaaa

SEQ ID NO: 23082 - RNA, 70 nt, synthetic construct
  source 1..70: mol_type = other RNA
ctgccatttcaccaggaacatgtagacctgggggaaagccagagtcgggggaccccattcagcctccaaa

SEQ ID NO: 23083 - RNA, 70 nt, synthetic construct
  source 1..70: mol_type = other RNA
ctgccatttcaccaggaacatgtaaacctgggggaaagccagagtcgggggaccccattcagcctccaaa

SEQ ID NO: 23084 - RNA, 70 nt, synthetic construct
  source 1..70: mol_type = other RNA
ctgccatttcaccaggaacatgtatacctgggggaaagccagagtcgggggaccccattcagcctccaaa

SEQ ID NO: 23085 - RNA, 71 nt, synthetic construct
  source 1..71: mol_type = other RNA
cctgccatttcaccaggaacatgtaaacctgggggaaagccagagtcgggggaccccattcagcctccaaa

SEQ ID NO: 23086 - RNA, 71 nt, synthetic construct
  source 1..71: mol_type = other RNA
cctgccatttcaccaggaacatgtacacctgggggaaagccagagtcgggggaccccattcagcctccaaa

SEQ ID NO: 23087 - RNA, 71 nt, synthetic construct
  source 1..71: mol_type = other RNA
cctgccatttcaccaggaacatgtatacctgggggaaagccagagtcgggggaccccattcagcctccaaa

SEQ ID NO: 23088 - RNA, 71 nt, synthetic construct
  source 1..71: mol_type = other RNA
cctgccatttcaccaggaacatgtagacctgggggaaagccagagtcgggggaccccattcagcctccaaa

SEQ ID NO: 23089 - RNA, 72 nt, synthetic construct
  source 1..72: mol_type = other RNA
tcctgccatttcaccaggaacatgtaaacctgggggaaagccagagtcgggggaccccattcagcctccaaa

SEQ ID NO: 23090 - RNA, 72 nt, synthetic construct
  source 1..72: mol_type = other RNA
tcctgccatttcaccaggaacatgtacacctgggggaaagccagagtcgggggaccccattcagcctccaaa

SEQ ID NO: 23091 - RNA, 72 nt, synthetic construct
  source 1..72: mol_type = other RNA
tcctgccatttcaccaggaacatgtatacctgggggaaagccagagtcgggggaccccattcagcctccaaa

SEQ ID NO: 23092 - RNA, 72 nt, synthetic construct
  source 1..72: mol_type = other RNA
tcctgccatttcaccaggaacatgtagacctgggggaaagccagagtcgggggaccccattcagcctccaaa

SEQ ID NO: 23093 - RNA, 73 nt, synthetic construct
  source 1..73: mol_type = other RNA
gtcctgccatttcaccaggaacatgtatacctgggggaaagccagagtcgggggaccccattcagcctccaaa

SEQ ID NO: 23094 - RNA, 73 nt, synthetic construct
  source 1..73: mol_type = other RNA
gtcctgccatttcaccaggaacatgtagacctgggggaaagccagagtcgggggaccccattcagcctccaaa

SEQ ID NO: 23095 - RNA, 73 nt, synthetic construct
  source 1..73: mol_type = other RNA
gtcctgccatttcaccaggaacatgtacacctgggggaaagccagagtcgggggaccccattcagcctccaaa

SEQ ID NO: 23096 - RNA, 73 nt, synthetic construct
  source 1..73: mol_type = other RNA
gtcctgccatttcaccaggaacatgtaaacctgggggaaagccagagtcgggggaccccattcagcctccaaa

SEQ ID NO: 23097 - RNA, 74 nt, synthetic construct
  source 1..74: mol_type = other RNA
ggtcctgccatttcaccaggaacatgtatacctgggggaaagccagagtcgggggaccccattcagcctccaaa

SEQ ID NO: 23098 - RNA, 74 nt, synthetic construct
  source 1..74: mol_type = other RNA
ggtcctgccatttcaccaggaacatgtaaacctgggggaaagccagagtcgggggaccccattcagcctccaaa

SEQ ID NO: 23099 - RNA, 74 nt, synthetic construct
  source 1..74: mol_type = other RNA
ggtcctgccatttcaccaggaacatgtagacctgggggaaagccagagtcgggggaccccattcagcctccaaa

SEQ ID NO: 23100 - RNA, 74 nt, synthetic construct
  source 1..74: mol_type = other RNA
ggtcctgccatttcaccaggaacatgtacacctgggggaaagccagagtcgggggaccccattcagcctccaaa

SEQ ID NO: 23101 - RNA, 75 nt, synthetic construct
  source 1..75: mol_type = other RNA
aggtcctgccatttcaccaggaacatgtatacctgggggaaagccagagtcgggggaccccattcagcctccaaa

SEQ ID NO: 23102 - RNA, 75 nt, synthetic construct
  source 1..75: mol_type = other RNA
aggtcctgccatttcaccaggaacatgtagacctgggggaaagccagagtcgggggaccccattcagcctccaaa

SEQ ID NO: 23103 - RNA, 75 nt, synthetic construct
  source 1..75: mol_type = other RNA
aggtcctgccatttcaccaggaacatgtacacctgggggaaagccagagtcgggggaccccattcagcctccaaa

SEQ ID NO: 23104 - RNA, 75 nt, synthetic construct
  source 1..75: mol_type = other RNA
aggtcctgccatttcaccaggaacatgtaaacctgggggaaagccagagtcgggggaccccattcagcctccaaa

SEQ ID NO: 23105 - RNA, 76 nt, synthetic construct
  source 1..76: mol_type = other RNA
caggtcctgccatttcaccaggaacatgtagacctgggggaaagccagagtcgggggaccccattcagcctccaaa

SEQ ID NO: 23106 - RNA, 76 nt, synthetic construct
  source 1..76: mol_type = other RNA
caggtcctgccatttcaccaggaacatgtaaacctgggggaaagccagagtcgggggaccccattcagcctccaaa

SEQ ID NO: 23107 - RNA, 76 nt, synthetic construct
  source 1..76: mol_type = other RNA
caggtcctgccatttcaccaggaacatgtatacctgggggaaagccagagtcgggggaccccattcagcctccaaa

SEQ ID NO: 23108 - RNA, 76 nt, synthetic construct
  source 1..76: mol_type = other RNA
caggtcctgccatttcaccaggaacatgtacacctgggggaaagccagagtcgggggaccccattcagcctccaaa

SEQ ID NO: 23109 - RNA, 77 nt, synthetic construct
  source 1..77: mol_type = other RNA
acaggtcctgccatttcaccaggaacatgtatacctgggggaaagccagagtcgggggaccccattcagcctccaaa

SEQ ID NO: 23110 - RNA, 77 nt, synthetic construct
  source 1..77: mol_type = other RNA
acaggtcctgccatttcaccaggaacatgtagacctgggggaaagccagagtcgggggaccccattcagcctccaaa

SEQ ID NO: 23111 - RNA, 77 nt, synthetic construct
  source 1..77: mol_type = other RNA
acaggtcctgccatttcaccaggaacatgtacacctgggggaaagccagagtcgggggaccccattcagcctccaaa

SEQ ID NO: 23112 - RNA, 77 nt, synthetic construct
  source 1..77: mol_type = other RNA
acaggtcctgccatttcaccaggaacatgtaaacctgggggaaagccagagtcgggggaccccattcagcctccaaa

SEQ ID NO: 23113 - RNA, 78 nt, synthetic construct
  source 1..78: mol_type = other RNA
gacaggtcctgccatttcaccaggaacatgtagacctgggggaaagccagagtcgggggaccccattcagcctccaaa

SEQ ID NO: 23114 - RNA, 78 nt, synthetic construct
  source 1..78: mol_type = other RNA
gacaggtcctgccatttcaccaggaacatgtatacctgggggaaagccagagtcgggggaccccattcagcctccaaa

SEQ ID NO: 23115 - RNA, 78 nt, synthetic construct
  source 1..78: mol_type = other RNA
gacaggtcctgccatttcaccaggaacatgtacacctgggggaaagccagagtcgggggaccccattcagcctccaaa

SEQ ID NO: 23116 - RNA, 78 nt, synthetic construct
  source 1..78: mol_type = other RNA
gacaggtcctgccatttcaccaggaacatgtaaacctgggggaaagccagagtcgggggaccccattcagcctccaaa

SEQ ID NO: 23117 - RNA, 79 nt, synthetic construct
  source 1..79: mol_type = other RNA
cgacaggtcctgccatttcaccaggaacatgtatacctgggggaaagccagagtcgggggaccccattcagcctccaaa

SEQ ID NO: 23118 - RNA, 79 nt, synthetic construct
  source 1..79: mol_type = other RNA
cgacaggtcctgccatttcaccaggaacatgtagacctgggggaaagccagagtcgggggaccccattcagcctccaaa

SEQ ID NO: 23119 - RNA, 79 nt, synthetic construct
  source 1..79: mol_type = other RNA
cgacaggtcctgccatttcaccaggaacatgtaaacctgggggaaagccagagtcgggggaccccattcagcctccaaa

SEQ ID NO: 23120 - RNA, 79 nt, synthetic construct
  source 1..79: mol_type = other RNA
cgacaggtcctgccatttcaccaggaacatgtacacctgggggaaagccagagtcgggggaccccattcagcctccaaa

SEQ ID NO: 23121 - RNA, 80 nt, synthetic construct
  source 1..80: mol_type = other RNA
ccgacaggtcctgccatttcaccaggaacatgtagacctgggggaaagccagagtcgggggaccccattcagcctccaaa

SEQ ID NO: 23122 - RNA, 80 nt, synthetic construct
  source 1..80: mol_type = other RNA
ccgacaggtcctgccatttcaccaggaacatgtatacctgggggaaagccagagtcgggggaccccattcagcctccaaa

SEQ ID NO: 23123 - RNA, 80 nt, synthetic construct
  source 1..80: mol_type = other RNA
ccgacaggtcctgccatttcaccaggaacatgtacacctgggggaaagccagagtcgggggaccccattcagcctccaaa

SEQ ID NO: 23124 - RNA, 80 nt, synthetic construct
  source 1..80: mol_type = other RNA
ccgacaggtcctgccatttcaccaggaacatgtaaacctgggggaaagccagagtcgggggaccccattcagcctccaaa

SEQ ID NO: 23125 - RNA, 81 nt, synthetic construct
  source 1..81: mol_type = other RNA
tccgacaggtcctgccatttcaccaggaacatgtatacctgggggaaagccagagtcgggggaccccattcagcctccaaa

SEQ ID NO: 23126 - RNA, 81 nt, synthetic construct
  source 1..81: mol_type = other RNA
tccgacaggtcctgccatttcaccaggaacatgtacacctgggggaaagccagagtcgggggaccccattcagcctccaaa

SEQ ID NO: 23127 - RNA, 81 nt, synthetic construct
  source 1..81: mol_type = other RNA
tccgacaggtcctgccatttcaccaggaacatgtaaacctgggggaaagccagagtcgggggaccccattcagcctccaaa

SEQ ID NO: 23128 - RNA, 81 nt, synthetic construct
  source 1..81: mol_type = other RNA
tccgacaggtcctgccatttcaccaggaacatgtagacctgggggaaagccagagtcgggggaccccattcagcctccaaa

SEQ ID NO: 23129 - RNA, 82 nt, synthetic construct
  source 1..82: mol_type = other RNA
ctccgacaggtcctgccatttcaccaggaacatgtatacctgggggaaagccagagtcgggggaccccattcagcctccaaa

SEQ ID NO: 23130 - RNA, 82 nt, synthetic construct
  source 1..82: mol_type = other RNA
ctccgacaggtcctgccatttcaccaggaacatgtagacctgggggaaagccagagtcgggggaccccattcagcctccaaa

SEQ ID NO: 23131 - RNA, 82 nt, synthetic construct
  source 1..82: mol_type = other RNA
ctccgacaggtcctgccatttcaccaggaacatgtacacctgggggaaagccagagtcgggggaccccattcagcctccaaa

SEQ ID NO: 23132 - RNA, 82 nt, synthetic construct
  source 1..82: mol_type = other RNA
ctccgacaggtcctgccatttcaccaggaacatgtaaacctgggggaaagccagagtcgggggaccccattcagcctccaaa

SEQ ID NO: 23133 - RNA, 83 nt, synthetic construct
  source 1..83: mol_type = other RNA
tctccgacaggtcctgccatttcaccaggaacatgtagacctgggggaaagccagagtcgggggaccccattcagcctccaaa

SEQ ID NO: 23134 - RNA, 83 nt, synthetic construct
  source 1..83: mol_type = other RNA
tctccgacaggtcctgccatttcaccaggaacatgtaaacctgggggaaagccagagtcgggggaccccattcagcctccaaa

SEQ ID NO: 23135 - RNA, 83 nt, synthetic construct
  source 1..83: mol_type = other RNA
tctccgacaggtcctgccatttcaccaggaacatgtatacctgggggaaagccagagtcgggggaccccattcagcctccaaa

SEQ ID NO: 23136 - RNA, 83 nt, synthetic construct
  source 1..83: mol_type = other RNA
tctccgacaggtcctgccatttcaccaggaacatgtacacctgggggaaagccagagtcgggggaccccattcagcctccaaa

SEQ ID NO: 23137 - RNA, 84 nt, synthetic construct
  source 1..84: mol_type = other RNA
ttctccgacaggtcctgccatttcaccaggaacatgtaaacctgggggaaagccagagtcgggggaccccattcagcctccaaa

SEQ ID NO: 23138 - RNA, 84 nt, synthetic construct
  source 1..84: mol_type = other RNA
ttctccgacaggtcctgccatttcaccaggaacatgtatacctgggggaaagccagagtcgggggaccccattcagcctccaaa

SEQ ID NO: 23139 - RNA, 84 nt, synthetic construct
  source 1..84: mol_type = other RNA
ttctccgacaggtcctgccatttcaccaggaacatgtacacctgggggaaagccagagtcgggggaccccattcagcctccaaa

SEQ ID NO: 23140 - RNA, 84 nt, synthetic construct
  source 1..84: mol_type = other RNA
ttctccgacaggtcctgccatttcaccaggaacatgtagacctgggggaaagccagagtcgggggaccccattcagcctccaaa

SEQ ID NO: 23141 - RNA, 85 nt, synthetic construct
  source 1..85: mol_type = other RNA
cttctccgacaggtcctgccatttcaccaggaacatgtagacctgggggaaagccagagtcgggggaccccattcagcctccaaa

SEQ ID NO: 23142 - RNA, 85 nt, synthetic construct
  source 1..85: mol_type = other RNA
cttctccgacaggtcctgccatttcaccaggaacatgtatacctgggggaaagccagagtcgggggaccccattcagcctccaaa

SEQ ID NO: 23143 - RNA, 85 nt, synthetic construct
  source 1..85: mol_type = other RNA
cttctccgacaggtcctgccatttcaccaggaacatgtacacctgggggaaagccagagtcgggggaccccattcagcctccaaa

SEQ ID NO: 23144 - RNA, 85 nt, synthetic construct
  source 1..85: mol_type = other RNA
cttctccgacaggtcctgccatttcaccaggaacatgtaaacctgggggaaagccagagtcgggggaccccattcagcctccaaa

SEQ ID NO: 23145 - RNA, 86 nt, synthetic construct
  source 1..86: mol_type = other RNA
ccttctccgacaggtcctgccatttcaccaggaacatgtaaacctgggggaaagccagagtcgggggaccccattcagcctccaaa

SEQ ID NO: 23146 - RNA, 86 nt, synthetic construct
  source 1..86: mol_type = other RNA
ccttctccgacaggtcctgccatttcaccaggaacatgtatacctgggggaaagccagagtcgggggaccccattcagcctccaaa

SEQ ID NO: 23147 - RNA, 86 nt, synthetic construct
  source 1..86: mol_type = other RNA
ccttctccgacaggtcctgccatttcaccaggaacatgtagacctgggggaaagccagagtcgggggaccccattcagcctccaaa

SEQ ID NO: 23148 - RNA, 86 nt, synthetic construct
  source 1..86: mol_type = other RNA
ccttctccgacaggtcctgccatttcaccaggaacatgtacacctgggggaaagccagagtcgggggaccccattcagcctccaaa

SEQ ID NO: 23149 - RNA, 87 nt, synthetic construct
  source 1..87: mol_type = other RNA
accttctccgacaggtcctgccatttcaccaggaacatgtacacctgggggaaagccagagtcgggggaccccattcagcctccaaa

SEQ ID NO: 23150 - RNA, 87 nt, synthetic construct
  source 1..87: mol_type = other RNA
accttctccgacaggtcctgccatttcaccaggaacatgtaaacctgggggaaagccagagtcgggggaccccattcagcctccaaa

SEQ ID NO: 23151 - RNA, 87 nt, synthetic construct
  source 1..87: mol_type = other RNA
accttctccgacaggtcctgccatttcaccaggaacatgtatacctgggggaaagccagagtcgggggaccccattcagcctccaaa

SEQ ID NO: 23152 - RNA, 87 nt, synthetic construct
  source 1..87: mol_type = other RNA
accttctccgacaggtcctgccatttcaccaggaacatgtagacctgggggaaagccagagtcgggggaccccattcagcctccaaa

SEQ ID NO: 23153 - RNA, 88 nt, synthetic construct
  source 1..88: mol_type = other RNA
caccttctccgacaggtcctgccatttcaccaggaacatgtatacctgggggaaagccagagtcgggggaccccattcagcctccaaa

SEQ ID NO: 23154 - RNA, 88 nt, synthetic construct
  source 1..88: mol_type = other RNA
caccttctccgacaggtcctgccatttcaccaggaacatgtaaacctgggggaaagccagagtcgggggaccccattcagcctccaaa

SEQ ID NO: 23155 - RNA, 88 nt, synthetic construct
  source 1..88: mol_type = other RNA
caccttctccgacaggtcctgccatttcaccaggaacatgtacacctgggggaaagccagagtcgggggaccccattcagcctccaaa

SEQ ID NO: 23156 - RNA, 88 nt, synthetic construct
  source 1..88: mol_type = other RNA
caccttctccgacaggtcctgccatttcaccaggaacatgtagacctgggggaaagccagagtcgggggaccccattcagcctccaaa

SEQ ID NO: 23157 - RNA, 89 nt, synthetic construct
  source 1..89: mol_type = other RNA
ccaccttctccgacaggtcctgccatttcaccaggaacatgtaaacctgggggaaagccagagtcgggggaccccattcagcctccaaa

SEQ ID NO: 23158 - RNA, 89 nt, synthetic construct
  source 1..89: mol_type = other RNA
ccaccttctccgacaggtcctgccatttcaccaggaacatgtatacctgggggaaagccagagtcgggggaccccattcagcctccaaa

SEQ ID NO: 23159 - RNA, 89 nt, synthetic construct
  source 1..89: mol_type = other RNA
ccaccttctccgacaggtcctgccatttcaccaggaacatgtacacctgggggaaagccagagtcgggggaccccattcagcctccaaa

SEQ ID NO: 23160 - RNA, 89 nt, synthetic construct
  source 1..89: mol_type = other RNA
ccaccttctccgacaggtcctgccatttcaccaggaacatgtagacctgggggaaagccagagtcgggggaccccattcagcctccaaa

SEQ ID NO: 23161 - RNA, 90 nt, synthetic construct
  source 1..90: mol_type = other RNA
accaccttctccgacaggtcctgccatttcaccaggaacatgtatacctgggggaaagccagagtcgggggaccccattcagcctccaaa

SEQ ID NO: 23162 - RNA, 90 nt, synthetic construct
  source 1..90: mol_type = other RNA
accaccttctccgacaggtcctgccatttcaccaggaacatgtaaacctgggggaaagccagagtcgggggaccccattcagcctccaaa

SEQ ID NO: 23163 - RNA, 90 nt, synthetic construct
  source 1..90: mol_type = other RNA
accaccttctccgacaggtcctgccatttcaccaggaacatgtagacctgggggaaagccagagtcgggggaccccattcagcctccaaa

SEQ ID NO: 23164 - RNA, 90 nt, synthetic construct
  source 1..90: mol_type = other RNA
accaccttctccgacaggtcctgccatttcaccaggaacatgtacacctgggggaaagccagagtcgggggaccccattcagcctccaaa

SEQ ID NO: 23165 - RNA, 91 nt, synthetic construct
  source 1..91: mol_type = other RNA
gaccaccttctccgacaggtcctgccatttcaccaggaacatgtaaacctgggggaaagccagagtcgggggaccccattcagcctccaaa

SEQ ID NO: 23166 - RNA, 91 nt, synthetic construct
  source 1..91: mol_type = other RNA
gaccaccttctccgacaggtcctgccatttcaccaggaacatgtacacctgggggaaagccagagtcgggggaccccattcagcctccaaa

SEQ ID NO: 23167 - RNA, 91 nt, synthetic construct
  source 1..91: mol_type = other RNA
gaccaccttctccgacaggtcctgccatttcaccaggaacatgtatacctgggggaaagccagagtcgggggaccccattcagcctccaaa

SEQ ID NO: 23168 - RNA, 91 nt, synthetic construct
  source 1..91: mol_type = other RNA
gaccaccttctccgacaggtcctgccatttcaccaggaacatgtagacctgggggaaagccagagtcgggggaccccattcagcctccaaa

SEQ ID NO: 23169 - RNA, 92 nt, synthetic construct
  source 1..92: mol_type = other RNA
agaccaccttctccgacaggtcctgccatttcaccaggaacatgtatacctgggggaaagccagagtcgggggaccccattcagcctccaaa

SEQ ID NO: 23170 - RNA, 92 nt, synthetic construct
  source 1..92: mol_type = other RNA
agaccaccttctccgacaggtcctgccatttcaccaggaacatgtagacctgggggaaagccagagtcgggggaccccattcagcctccaaa

SEQ ID NO: 23171 - RNA, 92 nt, synthetic construct
  source 1..92: mol_type = other RNA
agaccaccttctccgacaggtcctgccatttcaccaggaacatgtacacctgggggaaagccagagtcgggggaccccattcagcctccaaa

SEQ ID NO: 23172 - RNA, 92 nt, synthetic construct
  source 1..92: mol_type = other RNA
agaccaccttctccgacaggtcctgccatttcaccaggaacatgtaaacctgggggaaagccagagtcgggggaccccattcagcctccaaa

SEQ ID NO: 23173 - RNA, 93 nt, synthetic construct
  source 1..93: mol_type = other RNA
tagaccaccttctccgacaggtcctgccatttcaccaggaacatgtaaacctgggggaaagccagagtcgggggaccccattcagcctccaaa

SEQ ID NO: 23174 - RNA, 93 nt, synthetic construct
  source 1..93: mol_type = other RNA
tagaccaccttctccgacaggtcctgccatttcaccaggaacatgtatacctgggggaaagccagagtcgggggaccccattcagcctccaaa

SEQ ID NO: 23175 - RNA, 93 nt, synthetic construct
  source 1..93: mol_type = other RNA
tagaccaccttctccgacaggtcctgccatttcaccaggaacatgtacacctgggggaaagccagagtcgggggaccccattcagcctccaaa

SEQ ID NO: 23176 - RNA, 93 nt, synthetic construct
  source 1..93: mol_type = other RNA
tagaccaccttctccgacaggtcctgccatttcaccaggaacatgtagacctgggggaaagccagagtcgggggaccccattcagcctccaaa

SEQ ID NO: 23177 - RNA, 94 nt, synthetic construct
  source 1..94: mol_type = other RNA
gtagaccaccttctccgacaggtcctgccatttcaccaggaacatgtatacctgggggaaagccagagtcgggggaccccattcagcctccaaa

SEQ ID NO: 23178 - RNA, 94 nt, synthetic construct
  source 1..94: mol_type = other RNA
gtagaccaccttctccgacaggtcctgccatttcaccaggaacatgtagacctgggggaaagccagagtcgggggaccccattcagcctccaaa

SEQ ID NO: 23179 - RNA, 94 nt, synthetic construct
  source 1..94: mol_type = other RNA
gtagaccaccttctccgacaggtcctgccatttcaccaggaacatgtacacctgggggaaagccagagtcgggggaccccattcagcctccaaa

SEQ ID NO: 23180 - RNA, 94 nt, synthetic construct
  source 1..94: mol_type = other RNA
gtagaccaccttctccgacaggtcctgccatttcaccaggaacatgtaaacctgggggaaagccagagtcgggggaccccattcagcctccaaa

SEQ ID NO: 23181 - RNA, 95 nt, synthetic construct
  source 1..95: mol_type = other RNA
ggtagaccaccttctccgacaggtcctgccatttcaccaggaacatgtaaacctgggggaaagccagagtcgggggaccccattcagcctccaaa

SEQ ID NO: 23182 - RNA, 95 nt, synthetic construct
  source 1..95: mol_type = other RNA
ggtagaccaccttctccgacaggtcctgccatttcaccaggaacatgtagacctgggggaaagccagagtcgggggaccccattcagcctccaaa

SEQ ID NO: 23183 - RNA, 95 nt, synthetic construct
  source 1..95: mol_type = other RNA
ggtagaccaccttctccgacaggtcctgccatttcaccaggaacatgtacacctgggggaaagccagagtcgggggaccccattcagcctccaaa

SEQ ID NO: 23184 - RNA, 95 nt, synthetic construct
  source 1..95: mol_type = other RNA
ggtagaccaccttctccgacaggtcctgccatttcaccaggaacatgtatacctgggggaaagccagagtcgggggaccccattcagcctccaaa

SEQ ID NO: 23185 - RNA, 96 nt, synthetic construct
  source 1..96: mol_type = other RNA
cggtagaccaccttctccgacaggtcctgccatttcaccaggaacatgtacacctgggggaaagccagagtcgggggaccccattcagcctccaaa

SEQ ID NO: 23186 - RNA, 96 nt, synthetic construct
  source 1..96: mol_type = other RNA
cggtagaccaccttctccgacaggtcctgccatttcaccaggaacatgtatacctgggggaaagccagagtcgggggaccccattcagcctccaaa

SEQ ID NO: 23187 - RNA, 96 nt, synthetic construct
  source 1..96: mol_type = other RNA
cggtagaccaccttctccgacaggtcctgccatttcaccaggaacatgtaaacctgggggaaagccagagtcgggggaccccattcagcctccaaa

SEQ ID NO: 23188 - RNA, 96 nt, synthetic construct
  source 1..96: mol_type = other RNA
cggtagaccaccttctccgacaggtcctgccatttcaccaggaacatgtagacctgggggaaagccagagtcgggggaccccattcagcctccaaa

SEQ ID NO: 23189 - RNA, 97 nt, synthetic construct
  source 1..97: mol_type = other RNA
ccggtagaccaccttctccgacaggtcctgccatttcaccaggaacatgtagacctgggggaaagccagagtcgggggaccccattcagcctccaaa

SEQ ID NO: 23190 - RNA, 97 nt, synthetic construct
  source 1..97: mol_type = other RNA
ccggtagaccaccttctccgacaggtcctgccatttcaccaggaacatgtacacctgggggaaagccagagtcgggggaccccattcagcctccaaa

SEQ ID NO: 23191 - RNA, 97 nt, synthetic construct
  source 1..97: mol_type = other RNA
ccggtagaccaccttctccgacaggtcctgccatttcaccaggaacatgtaaacctgggggaaagccagagtcgggggaccccattcagcctccaaa

SEQ ID NO: 23192 - RNA, 97 nt, synthetic construct
  source 1..97: mol_type = other RNA
ccggtagaccaccttctccgacaggtcctgccatttcaccaggaacatgtatacctgggggaaagccagagtcgggggaccccattcagcctccaaa

SEQ ID NO: 23193 - RNA, 98 nt, synthetic construct
  source 1..98: mol_type = other RNA
gccggtagaccaccttctccgacaggtcctgccatttcaccaggaacatgtagacctgggggaaagccagagtcgggggaccccattcagcctccaaa

SEQ ID NO: 23194 - RNA, 98 nt, synthetic construct
  source 1..98: mol_type = other RNA
gccggtagaccaccttctccgacaggtcctgccatttcaccaggaacatgtaaacctgggggaaagccagagtcgggggaccccattcagcctccaaa

SEQ ID NO: 23195 - RNA, 98 nt, synthetic construct
  source 1..98: mol_type = other RNA
gccggtagaccaccttctccgacaggtcctgccatttcaccaggaacatgtacacctgggggaaagccagagtcgggggaccccattcagcctccaaa

SEQ ID NO: 23196 - RNA, 98 nt, synthetic construct
  source 1..98: mol_type = other RNA
gccggtagaccaccttctccgacaggtcctgccatttcaccaggaacatgtatacctgggggaaagccagagtcgggggaccccattcagcctccaaa

SEQ ID NO: 23197 - RNA, 99 nt, synthetic construct
  source 1..99: mol_type = other RNA
cgccggtagaccaccttctccgacaggtcctgccatttcaccaggaacatgtatacctgggggaaagccagagtcgggggaccccattcagcctccaaa

SEQ ID NO: 23198 - RNA, 99 nt, synthetic construct
  source 1..99: mol_type = other RNA
cgccggtagaccaccttctccgacaggtcctgccatttcaccaggaacatgtacacctgggggaaagccagagtcgggggaccccattcagcctccaaa

SEQ ID NO: 23199 - RNA, 99 nt, synthetic construct
  source 1..99: mol_type = other RNA
cgccggtagaccaccttctccgacaggtcctgccatttcaccaggaacatgtagacctgggggaaagccagagtcgggggaccccattcagcctccaaa

SEQ ID NO: 23200 - RNA, 99 nt, synthetic construct
  source 1..99: mol_type = other RNA
cgccggtagaccaccttctccgacaggtcctgccatttcaccaggaacatgtaaacctgggggaaagccagagtcgggggaccccattcagcctccaaa

SEQ ID NO: 23201 - RNA, 100 nt, synthetic construct
  source 1..100: mol_type = other RNA
gcgccggtagaccaccttctccgacaggtcctgccatttcaccaggaacatgtatacctgggggaaagccagagtcgggggaccccattcagcctccaaa

SEQ ID NO: 23202 - RNA, 100 nt, synthetic construct
  source 1..100: mol_type = other RNA
gcgccggtagaccaccttctccgacaggtcctgccatttcaccaggaacatgtagacctgggggaaagccagagtcgggggaccccattcagcctccaaa

SEQ ID NO: 23203 - RNA, 100 nt, synthetic construct
  source 1..100: mol_type = other RNA
gcgccggtagaccaccttctccgacaggtcctgccatttcaccaggaacatgtacacctgggggaaagccagagtcgggggaccccattcagcctccaaa

SEQ ID NO: 23204 - RNA, 100 nt, synthetic construct
  source 1..100: mol_type = other RNA
gcgccggtagaccaccttctccgacaggtcctgccatttcaccaggaacatgtaaacctgggggaaagccagagtcgggggaccccattcagcctccaaa

SEQ ID NO: 23205 - RNA, 101 nt, synthetic construct
  source 1..101: mol_type = other RNA
agcgccggtagaccaccttctccgacaggtcctgccatttcaccaggaacatgtacacctgggggaaagccagagtcgggggaccccattcagcctccaaa

SEQ ID NO: 23206 - RNA, 101 nt, synthetic construct
  source 1..101: mol_type = other RNA
agcgccggtagaccaccttctccgacaggtcctgccatttcaccaggaacatgtatacctgggggaaagccagagtcgggggaccccattcagcctccaaa

SEQ ID NO: 23207 - RNA, 101 nt, synthetic construct
  source 1..101: mol_type = other RNA
agcgccggtagaccaccttctccgacaggtcctgccatttcaccaggaacatgtagacctgggggaaagccagagtcgggggaccccattcagcctccaaa

SEQ ID NO: 23208 - RNA, 101 nt, synthetic construct
  source 1..101: mol_type = other RNA
agcgccggtagaccaccttctccgacaggtcctgccatttcaccaggaacatgtaaacctgggggaaagccagagtcgggggaccccattcagcctccaaa

SEQ ID NO: 23209 - RNA, 102 nt, synthetic construct
  source 1..102: mol_type = other RNA
aagcgccggtagaccaccttctccgacaggtcctgccatttcaccaggaacatgtatacctgggggaaagccagagtcgggggaccccattcagcctccaaa

SEQ ID NO: 23210 - RNA, 102 nt, synthetic construct
  source 1..102: mol_type = other RNA
aagcgccggtagaccaccttctccgacaggtcctgccatttcaccaggaacatgtagacctgggggaaagccagagtcgggggaccccattcagcctccaaa

SEQ ID NO: 23211 - RNA, 102 nt, synthetic construct
  source 1..102: mol_type = other RNA
aagcgccggtagaccaccttctccgacaggtcctgccatttcaccaggaacatgtacacctgggggaaagccagagtcgggggaccccattcagcctccaaa

SEQ ID NO: 23212 - RNA, 102 nt, synthetic construct
  source 1..102: mol_type = other RNA
aagcgccggtagaccaccttctccgacaggtcctgccatttcaccaggaacatgtaaacctgggggaaagccagagtcgggggaccccattcagcctccaaa

SEQ ID NO: 23213 - RNA, 103 nt, synthetic construct
  source 1..103: mol_type = other RNA
gaagcgccggtagaccaccttctccgacaggtcctgccatttcaccaggaacatgtacacctgggggaaagccagagtcgggggaccccattcagcctccaaa

SEQ ID NO: 23214 - RNA, 103 nt, synthetic construct
  source 1..103: mol_type = other RNA
gaagcgccggtagaccaccttctccgacaggtcctgccatttcaccaggaacatgtaaacctgggggaaagccagagtcgggggaccccattcagcctccaaa

SEQ ID NO: 23215 - RNA, 103 nt, synthetic construct
  source 1..103: mol_type = other RNA
gaagcgccggtagaccaccttctccgacaggtcctgccatttcaccaggaacatgtatacctgggggaaagccagagtcgggggaccccattcagcctccaaa

SEQ ID NO: 23216 - RNA, 103 nt, synthetic construct
  source 1..103: mol_type = other RNA
gaagcgccggtagaccaccttctccgacaggtcctgccatttcaccaggaacatgtagacctgggggaaagccagagtcgggggaccccattcagcctccaaa

SEQ ID NO: 23217 - RNA, 19 nt, synthetic construct
  source 1..19: mol_type = other RNA
gagttccatgtgagtgtgg

SEQ ID NO: 23218 - RNA, 19 nt, synthetic construct
  source 1..19: mol_type = other RNA
atgtgagtgtggggatgga

SEQ ID NO: 23219 - RNA, 20 nt, synthetic construct
  source 1..20: mol_type = other RNA
ttccatgtgagtgtggggat

SEQ ID NO: 23220 - RNA, 20 nt, synthetic construct
  source 1..20: mol_type = other RNA
tgagtgtggggatggaggag

SEQ ID NO: 23221 - RNA, 20 nt, synthetic construct
  source 1..20: mol_type = other RNA
catgtgagtgtggggatgga

SEQ ID NO: 23222 - RNA, 20 nt, synthetic construct
  source 1..20: mol_type = other RNA
cgagttccatgtgagtgtgg

SEQ ID NO: 23223 - RNA, 16 nt, synthetic construct
  source 1..16: mol_type = other RNA
ggtagaccaccttctc

SEQ ID NO: 23224 - RNA, 17 nt, synthetic construct
  source 1..17: mol_type = other RNA
cggtagaccaccttctc

SEQ ID NO: 23225 - RNA, 18 nt, synthetic construct
  source 1..18: mol_type = other RNA
ccggtagaccaccttctc

SEQ ID NO: 23226 - RNA, 19 nt, synthetic construct
  source 1..19: mol_type = other RNA
gccggtagaccaccttctc

SEQ ID NO: 23227 - RNA, 20 nt, synthetic construct
  source 1..20: mol_type = other RNA
cgccggtagaccaccttctc

SEQ ID NO: 23228 - RNA, 21 nt, synthetic construct
  source 1..21: mol_type = other RNA
gcgccggtagaccaccttctc

SEQ ID NO: 23229 - RNA, 22 nt, synthetic construct
  source 1..22: mol_type = other RNA
agcgccggtagaccaccttctc

SEQ ID NO: 23230-23235 - skipped (6 entries)

SEQ ID NO: 23236 - RNA, 10 nt, synthetic construct
  source 1..10: mol_type = other RNA
aaggtggtct

SEQ ID NO: 23237 - RNA, 11 nt, synthetic construct
  source 1..11: mol_type = other RNA
aaggtggtcta

SEQ ID NO: 23238 - RNA, 12 nt, synthetic construct
  source 1..12: mol_type = other RNA
aaggtggtctac

SEQ ID NO: 23239 - RNA, 13 nt, synthetic construct
  source 1..13: mol_type = other RNA
aaggtggtctacc

SEQ ID NO: 23240 - RNA, 14 nt, synthetic construct
  source 1..14: mol_type = other RNA
aaggtggtctaccg

SEQ ID NO: 23241 - RNA, 15 nt, synthetic construct
  source 1..15: mol_type = other RNA
aaggtggtctaccgg

SEQ ID NO: 23242 - RNA, 16 nt, synthetic construct
  source 1..16: mol_type = other RNA
aaggtggtctaccggc

SEQ ID NO: 23243 - RNA, 17 nt, synthetic construct
  source 1..17: mol_type = other RNA
aaggtggtctaccggcg

SEQ ID NO: 23244 - RNA, 18 nt, synthetic construct
  source 1..18: mol_type = other RNA
aaggtggtctaccggcgc

SEQ ID NO: 23245 - RNA, 19 nt, synthetic construct
  source 1..19: mol_type = other RNA
aaggtggtctaccggcgct

SEQ ID NO: 23246 - RNA, 39 nt, synthetic construct
  source 1..39: mol_type = other RNA
gtgtacatgttcctggtgaaatggcaggacctgagtgag

SEQ ID NO: 23247 - RNA, 39 nt, synthetic construct
  source 1..39: mol_type = other RNA
gtatacatgttcctggtgaaatggcaggacctgagcgag

SEQ ID NO: 23248 - RNA, 39 nt, synthetic construct
  source 1..39: mol_type = other RNA
gtttacatgttcctggtgaaatggcaggacctgagcgag

SEQ ID NO: 23249 - RNA, 39 nt, synthetic construct
  source 1..39: mol_type = other RNA
gtctacatgttcctggtgaaatggcaggacctgagcgag

SEQ ID NO: 23250 - RNA, 39 nt, synthetic construct
  source 1..39: mol_type = other RNA
gtatacatgttcctggtgaaatggcaggacctgtcggag

SEQ ID NO: 23251 - RNA, 39 nt, synthetic construct
  source 1..39: mol_type = other RNA
gtatacatgttcctggtgaaatggcaggacctgagtgag

SEQ ID NO: 23252 - RNA, 39 nt, synthetic construct
  source 1..39: mol_type = other RNA
gtgtacatgttcctggtgaaatggcaggacctgtcggag

SEQ ID NO: 23253 - RNA, 39 nt, synthetic construct
  source 1..39: mol_type = other RNA
gtttacatgttcctggtgaaatggcaggacctgagtgag

SEQ ID NO: 23254 - RNA, 39 nt, synthetic construct
  source 1..39: mol_type = other RNA
gtctacatgttcctggtgaaatggcaggacctgagtgag

SEQ ID NO: 23255 - RNA, 39 nt, synthetic construct
  source 1..39: mol_type = other RNA
gtttacatgttcctggtgaaatggcaggacctgtcggag

SEQ ID NO: 23256 - RNA, 39 nt, synthetic construct
  source 1..39: mol_type = other RNA
gtgtacatgttcctggtgaaatggcaggacctgagcgag

SEQ ID NO: 23257 - RNA, 39 nt, synthetic construct
  source 1..39: mol_type = other RNA
gtctacatgttcctggtgaaatggcaggacctgtcggag

SEQ ID NO: 23258 - RNA, 40 nt, synthetic construct
  source 1..40: mol_type = other RNA
ggtttacatgttcctggtgaaatggcaggacctgagcgag

SEQ ID NO: 23259 - RNA, 40 nt, synthetic construct
  source 1..40: mol_type = other RNA
ggtctacatgttcctggtgaaatggcaggacctgtcggag

SEQ ID NO: 23260 - RNA, 40 nt, synthetic construct
  source 1..40: mol_type = other RNA
ggtgtacatgttcctggtgaaatggcaggacctgagcgag

SEQ ID NO: 23261 - RNA, 40 nt, synthetic construct
  source 1..40: mol_type = other RNA
ggtttacatgttcctggtgaaatggcaggacctgagtgag

SEQ ID NO: 23262 - RNA, 40 nt, synthetic construct
  source 1..40: mol_type = other RNA
ggtgtacatgttcctggtgaaatggcaggacctgtcggag

SEQ ID NO: 23263 - RNA, 40 nt, synthetic construct
  source 1..40: mol_type = other RNA
ggtttacatgttcctggtgaaatggcaggacctgtcggag

SEQ ID NO: 23264 - RNA, 40 nt, synthetic construct
  source 1..40: mol_type = other RNA
ggtatacatgttcctggtgaaatggcaggacctgagcgag

SEQ ID NO: 23265 - RNA, 40 nt, synthetic construct
  source 1..40: mol_type = other RNA
ggtatacatgttcctggtgaaatggcaggacctgagtgag

SEQ ID NO: 23266 - RNA, 40 nt, synthetic construct
  source 1..40: mol_type = other RNA
ggtatacatgttcctggtgaaatggcaggacctgtcggag

SEQ ID NO: 23267 - RNA, 40 nt, synthetic construct
  source 1..40: mol_type = other RNA
ggtctacatgttcctggtgaaatggcaggacctgagcgag

SEQ ID NO: 23268 - RNA, 40 nt, synthetic construct
  source 1..40: mol_type = other RNA
ggtctacatgttcctggtgaaatggcaggacctgagtgag

SEQ ID NO: 23269 - RNA, 40 nt, synthetic construct
  source 1..40: mol_type = other RNA
ggtgtacatgttcctggtgaaatggcaggacctgagtgag

SEQ ID NO: 23270 - RNA, 41 nt, synthetic construct
  source 1..41: mol_type = other RNA
aggtttacatgttcctggtgaaatggcaggacctgagtgag

SEQ ID NO: 23271 - RNA, 41 nt, synthetic construct
  source 1..41: mol_type = other RNA
aggtgtacatgttcctggtgaaatggcaggacctgtcggag

SEQ ID NO: 23272 - RNA, 41 nt, synthetic construct
  source 1..41: mol_type = other RNA
aggtttacatgttcctggtgaaatggcaggacctgagcgag

SEQ ID NO: 23273 - RNA, 41 nt, synthetic construct
  source 1..41: mol_type = other RNA
aggtttacatgttcctggtgaaatggcaggacctgtcggag

SEQ ID NO: 23274 - RNA, 41 nt, synthetic construct
  source 1..41: mol_type = other RNA
aggtgtacatgttcctggtgaaatggcaggacctgagtgag

SEQ ID NO: 23275 - RNA, 41 nt, synthetic construct
  source 1..41: mol_type = other RNA
aggtatacatgttcctggtgaaatggcaggacctgagcgag

SEQ ID NO: 23276 - RNA, 41 nt, synthetic construct
  source 1..41: mol_type = other RNA
aggtatacatgttcctggtgaaatggcaggacctgagtgag

SEQ ID NO: 23277 - RNA, 41 nt, synthetic construct
  source 1..41: mol_type = other RNA
aggtctacatgttcctggtgaaatggcaggacctgagtgag

SEQ ID NO: 23278 - RNA, 41 nt, synthetic construct
  source 1..41: mol_type = other RNA
aggtctacatgttcctggtgaaatggcaggacctgtcggag

SEQ ID NO: 23279 - RNA, 41 nt, synthetic construct
  source 1..41: mol_type = other RNA
aggtgtacatgttcctggtgaaatggcaggacctgagcgag

SEQ ID NO: 23280 - RNA, 41 nt, synthetic construct
  source 1..41: mol_type = other RNA
aggtatacatgttcctggtgaaatggcaggacctgtcggag

SEQ ID NO: 23281 - RNA, 41 nt, synthetic construct
  source 1..41: mol_type = other RNA
aggtctacatgttcctggtgaaatggcaggacctgagcgag

SEQ ID NO: 23282 - RNA, 42 nt, synthetic construct
  source 1..42: mol_type = other RNA
caggtttacatgttcctggtgaaatggcaggacctgtcggag

SEQ ID NO: 23283 - RNA, 42 nt, synthetic construct
  source 1..42: mol_type = other RNA
caggtttacatgttcctggtgaaatggcaggacctgagtgag

SEQ ID NO: 23284 - RNA, 42 nt, synthetic construct
  source 1..42: mol_type = other RNA
caggtttacatgttcctggtgaaatggcaggacctgagcgag

SEQ ID NO: 23285 - RNA, 42 nt, synthetic construct
  source 1..42: mol_type = other RNA
caggtgtacatgttcctggtgaaatggcaggacctgagtgag

SEQ ID NO: 23286 - RNA, 42 nt, synthetic construct
  source 1..42: mol_type = other RNA
caggtgtacatgttcctggtgaaatggcaggacctgagcgag

SEQ ID NO: 23287 - RNA, 42 nt, synthetic construct
  source 1..42: mol_type = other RNA
caggtctacatgttcctggtgaaatggcaggacctgagtgag

SEQ ID NO: 23288 - RNA, 42 nt, synthetic construct
  source 1..42: mol_type = other RNA
caggtctacatgttcctggtgaaatggcaggacctgagcgag

SEQ ID NO: 23289 - RNA, 42 nt, synthetic construct
  source 1..42: mol_type = other RNA
caggtatacatgttcctggtgaaatggcaggacctgagtgag

SEQ ID NO: 23290 - RNA, 42 nt, synthetic construct
  source 1..42: mol_type = other RNA
caggtatacatgttcctggtgaaatggcaggacctgagcgag

SEQ ID NO: 23291 - RNA, 42 nt, synthetic construct
  source 1..42: mol_type = other RNA
caggtctacatgttcctggtgaaatggcaggacctgtcggag

SEQ ID NO: 23292 - RNA, 42 nt, synthetic construct
  source 1..42: mol_type = other RNA
caggtgtacatgttcctggtgaaatggcaggacctgtcggag

SEQ ID NO: 23293 - RNA, 42 nt, synthetic construct
  source 1..42: mol_type = other RNA
caggtatacatgttcctggtgaaatggcaggacctgtcggag

SEQ ID NO: 23294 - RNA, 43 nt, synthetic construct
  source 1..43: mol_type = other RNA
ccaggtgtacatgttcctggtgaaatggcaggacctgagcgag

SEQ ID NO: 23295 - RNA, 43 nt, synthetic construct
  source 1..43: mol_type = other RNA
ccaggtctacatgttcctggtgaaatggcaggacctgagcgag

SEQ ID NO: 23296 - RNA, 43 nt, synthetic construct
  source 1..43: mol_type = other RNA
ccaggtttacatgttcctggtgaaatggcaggacctgtcggag

SEQ ID NO: 23297 - RNA, 43 nt, synthetic construct
  source 1..43: mol_type = other RNA
ccaggtgtacatgttcctggtgaaatggcaggacctgtcggag

SEQ ID NO: 23298 - RNA, 43 nt, synthetic construct
  source 1..43: mol_type = other RNA
ccaggtttacatgttcctggtgaaatggcaggacctgagcgag

SEQ ID NO: 23299 - RNA, 43 nt, synthetic construct
  source 1..43: mol_type = other RNA
ccaggtttacatgttcctggtgaaatggcaggacctgagtgag

SEQ ID NO: 23300 - RNA, 43 nt, synthetic construct
  source 1..43: mol_type = other RNA
ccaggtctacatgttcctggtgaaatggcaggacctgagtgag

SEQ ID NO: 23301 - RNA, 43 nt, synthetic construct
  source 1..43: mol_type = other RNA
ccaggtgtacatgttcctggtgaaatggcaggacctgagtgag

SEQ ID NO: 23302 - RNA, 43 nt, synthetic construct
  source 1..43: mol_type = other RNA
ccaggtatacatgttcctggtgaaatggcaggacctgtcggag

SEQ ID NO: 23303 - RNA, 43 nt, synthetic construct
  source 1..43: mol_type = other RNA
ccaggtctacatgttcctggtgaaatggcaggacctgtcggag

SEQ ID NO: 23304 - RNA, 43 nt, synthetic construct
  source 1..43: mol_type = other RNA
ccaggtatacatgttcctggtgaaatggcaggacctgagtgag

SEQ ID NO: 23305 - RNA, 43 nt, synthetic construct
  source 1..43: mol_type = other RNA
ccaggtatacatgttcctggtgaaatggcaggacctgagcgag

SEQ ID NO: 23306 - RNA, 44 nt, synthetic construct
  source 1..44: mol_type = other RNA
cccaggtgtacatgttcctggtgaaatggcaggacctgtcggag

SEQ ID NO: 23307 - RNA, 44 nt, synthetic construct
  source 1..44: mol_type = other RNA
cccaggtttacatgttcctggtgaaatggcaggacctgagcgag

SEQ ID NO: 23308 - RNA, 44 nt, synthetic construct
  source 1..44: mol_type = other RNA
cccaggtatacatgttcctggtgaaatggcaggacctgagtgag

SEQ ID NO: 23309 - RNA, 44 nt, synthetic construct
  source 1..44: mol_type = other RNA
cccaggtgtacatgttcctggtgaaatggcaggacctgagcgag

SEQ ID NO: 23310 - RNA, 44 nt, synthetic construct
  source 1..44: mol_type = other RNA
cccaggtgtacatgttcctggtgaaatggcaggacctgagtgag

SEQ ID NO: 23311 - RNA, 44 nt, synthetic construct
  source 1..44: mol_type = other RNA
cccaggtttacatgttcctggtgaaatggcaggacctgagtgag

SEQ ID NO: 23312 - RNA, 44 nt, synthetic construct
  source 1..44: mol_type = other RNA
cccaggtctacatgttcctggtgaaatggcaggacctgtcggag

SEQ ID NO: 23313 - RNA, 44 nt, synthetic construct
  source 1..44: mol_type = other RNA
cccaggtctacatgttcctggtgaaatggcaggacctgagtgag

SEQ ID NO: 23314 - RNA, 44 nt, synthetic construct
  source 1..44: mol_type = other RNA
cccaggtatacatgttcctggtgaaatggcaggacctgagcgag

SEQ ID NO: 23315 - RNA, 44 nt, synthetic construct
  source 1..44: mol_type = other RNA
cccaggtttacatgttcctggtgaaatggcaggacctgtcggag

SEQ ID NO: 23316 - RNA, 44 nt, synthetic construct
  source 1..44: mol_type = other RNA
cccaggtctacatgttcctggtgaaatggcaggacctgagcgag

SEQ ID NO: 23317 - RNA, 44 nt, synthetic construct
  source 1..44: mol_type = other RNA
cccaggtatacatgttcctggtgaaatggcaggacctgtcggag

SEQ ID NO: 23318 - RNA, 45 nt, synthetic construct
  source 1..45: mol_type = other RNA
ccccaggtatacatgttcctggtgaaatggcaggacctgtcggag

SEQ ID NO: 23319 - RNA, 45 nt, synthetic construct
  source 1..45: mol_type = other RNA
ccccaggtgtacatgttcctggtgaaatggcaggacctgagcgag

SEQ ID NO: 23320 - RNA, 45 nt, synthetic construct
  source 1..45: mol_type = other RNA
ccccaggtttacatgttcctggtgaaatggcaggacctgtcggag

SEQ ID NO: 23321 - RNA, 45 nt, synthetic construct
  source 1..45: mol_type = other RNA
ccccaggtttacatgttcctggtgaaatggcaggacctgagtgag

SEQ ID NO: 23322 - RNA, 45 nt, synthetic construct
  source 1..45: mol_type = other RNA
ccccaggtctacatgttcctggtgaaatggcaggacctgagtgag

SEQ ID NO: 23323 - RNA, 45 nt, synthetic construct
  source 1..45: mol_type = other RNA
ccccaggtatacatgttcctggtgaaatggcaggacctgagtgag

SEQ ID NO: 23324 - RNA, 45 nt, synthetic construct
  source 1..45: mol_type = other RNA
ccccaggtctacatgttcctggtgaaatggcaggacctgagcgag

SEQ ID NO: 23325 - RNA, 45 nt, synthetic construct
  source 1..45: mol_type = other RNA
ccccaggtgtacatgttcctggtgaaatggcaggacctgtcggag

SEQ ID NO: 23326 - RNA, 45 nt, synthetic construct
  source 1..45: mol_type = other RNA
ccccaggtgtacatgttcctggtgaaatggcaggacctgagtgag

SEQ ID NO: 23327 - RNA, 45 nt, synthetic construct
  source 1..45: mol_type = other RNA
ccccaggtatacatgttcctggtgaaatggcaggacctgagcgag

SEQ ID NO: 23328 - RNA, 45 nt, synthetic construct
  source 1..45: mol_type = other RNA
ccccaggtttacatgttcctggtgaaatggcaggacctgagcgag

SEQ ID NO: 23329 - RNA, 45 nt, synthetic construct
  source 1..45: mol_type = other RNA
ccccaggtctacatgttcctggtgaaatggcaggacctgtcggag

SEQ ID NO: 23330 - RNA, 46 nt, synthetic construct
  source 1..46: mol_type = other RNA
cccccaggtgtacatgttcctggtgaaatggcaggacctgagtgag

SEQ ID NO: 23331 - RNA, 46 nt, synthetic construct
  source 1..46: mol_type = other RNA
cccccaggtttacatgttcctggtgaaatggcaggacctgtcggag

SEQ ID NO: 23332 - RNA, 46 nt, synthetic construct
  source 1..46: mol_type = other RNA
cccccaggtttacatgttcctggtgaaatggcaggacctgagcgag

SEQ ID NO: 23333 - RNA, 46 nt, synthetic construct
  source 1..46: mol_type = other RNA
cccccaggtttacatgttcctggtgaaatggcaggacctgagtgag

SEQ ID NO: 23334 - RNA, 46 nt, synthetic construct
  source 1..46: mol_type = other RNA
cccccaggtgtacatgttcctggtgaaatggcaggacctgtcggag

SEQ ID NO: 23335 - RNA, 46 nt, synthetic construct
  source 1..46: mol_type = other RNA
cccccaggtatacatgttcctggtgaaatggcaggacctgagtgag

SEQ ID NO: 23336 - RNA, 46 nt, synthetic construct
  source 1..46: mol_type = other RNA
cccccaggtgtacatgttcctggtgaaatggcaggacctgagcgag

SEQ ID NO: 23337 - RNA, 46 nt, synthetic construct
  source 1..46: mol_type = other RNA
cccccaggtctacatgttcctggtgaaatggcaggacctgtcggag

SEQ ID NO: 23338 - RNA, 46 nt, synthetic construct
  source 1..46: mol_type = other RNA
cccccaggtctacatgttcctggtgaaatggcaggacctgagcgag

SEQ ID NO: 23339 - RNA, 46 nt, synthetic construct
  source 1..46: mol_type = other RNA
cccccaggtctacatgttcctggtgaaatggcaggacctgagtgag

SEQ ID NO: 23340 - RNA, 46 nt, synthetic construct
  source 1..46: mol_type = other RNA
cccccaggtatacatgttcctggtgaaatggcaggacctgtcggag

SEQ ID NO: 23341 - RNA, 46 nt, synthetic construct
  source 1..46: mol_type = other RNA
cccccaggtatacatgttcctggtgaaatggcaggacctgagcgag

SEQ ID NO: 23342 - RNA, 47 nt, synthetic construct
  source 1..47: mol_type = other RNA
tcccccaggtatacatgttcctggtgaaatggcaggacctgagtgag

SEQ ID NO: 23343 - RNA, 47 nt, synthetic construct
  source 1..47: mol_type = other RNA
tcccccaggtatacatgttcctggtgaaatggcaggacctgtcggag

SEQ ID NO: 23344 - RNA, 47 nt, synthetic construct
  source 1..47: mol_type = other RNA
tcccccaggtctacatgttcctggtgaaatggcaggacctgagcgag

SEQ ID NO: 23345 - RNA, 47 nt, synthetic construct
  source 1..47: mol_type = other RNA
tcccccaggtctacatgttcctggtgaaatggcaggacctgagtgag

SEQ ID NO: 23346 - RNA, 47 nt, synthetic construct
  source 1..47: mol_type = other RNA
tcccccaggtctacatgttcctggtgaaatggcaggacctgtcggag

SEQ ID NO: 23347 - RNA, 47 nt, synthetic construct
  source 1..47: mol_type = other RNA
tcccccaggtgtacatgttcctggtgaaatggcaggacctgagcgag

SEQ ID NO: 23348 - RNA, 47 nt, synthetic construct
  source 1..47: mol_type = other RNA
tcccccaggtttacatgttcctggtgaaatggcaggacctgtcggag

SEQ ID NO: 23349 - RNA, 47 nt, synthetic construct
  source 1..47: mol_type = other RNA
tcccccaggtgtacatgttcctggtgaaatggcaggacctgagtgag

SEQ ID NO: 23350 - RNA, 47 nt, synthetic construct
  source 1..47: mol_type = other RNA
tcccccaggtgtacatgttcctggtgaaatggcaggacctgtcggag

SEQ ID NO: 23351 - RNA, 47 nt, synthetic construct
  source 1..47: mol_type = other RNA
tcccccaggtttacatgttcctggtgaaatggcaggacctgagcgag

SEQ ID NO: 23352 - RNA, 47 nt, synthetic construct
  source 1..47: mol_type = other RNA
tcccccaggtttacatgttcctggtgaaatggcaggacctgagtgag

SEQ ID NO: 23353 - RNA, 47 nt, synthetic construct
  source 1..47: mol_type = other RNA
tcccccaggtatacatgttcctggtgaaatggcaggacctgagcgag

SEQ ID NO: 23354 - RNA, 48 nt, synthetic construct
  source 1..48: mol_type = other RNA
ttcccccaggtatacatgttcctggtgaaatggcaggacctgtcggag

SEQ ID NO: 23355 - RNA, 48 nt, synthetic construct
  source 1..48: mol_type = other RNA
ttcccccaggtctacatgttcctggtgaaatggcaggacctgagcgag

SEQ ID NO: 23356 - RNA, 48 nt, synthetic construct
  source 1..48: mol_type = other RNA
ttcccccaggtgtacatgttcctggtgaaatggcaggacctgagtgag

SEQ ID NO: 23357 - RNA, 48 nt, synthetic construct
  source 1..48: mol_type = other RNA
ttcccccaggtctacatgttcctggtgaaatggcaggacctgagtgag

SEQ ID NO: 23358 - RNA, 48 nt, synthetic construct
  source 1..48: mol_type = other RNA
ttcccccaggtctacatgttcctggtgaaatggcaggacctgtcggag

SEQ ID NO: 23359 - RNA, 48 nt, synthetic construct
  source 1..48: mol_type = other RNA
ttcccccaggtttacatgttcctggtgaaatggcaggacctgagcgag

SEQ ID NO: 23360 - RNA, 48 nt, synthetic construct
  source 1..48: mol_type = other RNA
ttcccccaggtttacatgttcctggtgaaatggcaggacctgagtgag

SEQ ID NO: 23361 - RNA, 48 nt, synthetic construct
  source 1..48: mol_type = other RNA
ttcccccaggtatacatgttcctggtgaaatggcaggacctgagtgag

SEQ ID NO: 23362 - RNA, 48 nt, synthetic construct
  source 1..48: mol_type = other RNA
ttcccccaggtatacatgttcctggtgaaatggcaggacctgagcgag

SEQ ID NO: 23363 - RNA, 48 nt, synthetic construct
  source 1..48: mol_type = other RNA
ttcccccaggtgtacatgttcctggtgaaatggcaggacctgtcggag

SEQ ID NO: 23364 - RNA, 48 nt, synthetic construct
  source 1..48: mol_type = other RNA
ttcccccaggtgtacatgttcctggtgaaatggcaggacctgagcgag

SEQ ID NO: 23365 - RNA, 48 nt, synthetic construct
  source 1..48: mol_type = other RNA
ttcccccaggtttacatgttcctggtgaaatggcaggacctgtcggag

SEQ ID NO: 23366 - RNA, 49 nt, synthetic construct
  source 1..49: mol_type = other RNA
tttcccccaggtttacatgttcctggtgaaatggcaggacctgagtgag

SEQ ID NO: 23367 - RNA, 49 nt, synthetic construct
  source 1..49: mol_type = other RNA
tttcccccaggtgtacatgttcctggtgaaatggcaggacctgagcgag

SEQ ID NO: 23368 - RNA, 49 nt, synthetic construct
  source 1..49: mol_type = other RNA
tttcccccaggtttacatgttcctggtgaaatggcaggacctgtcggag

SEQ ID NO: 23369 - RNA, 49 nt, synthetic construct
  source 1..49: mol_type = other RNA
tttcccccaggtgtacatgttcctggtgaaatggcaggacctgtcggag

SEQ ID NO: 23370 - RNA, 49 nt, synthetic construct
  source 1..49: mol_type = other RNA
tttcccccaggtgtacatgttcctggtgaaatggcaggacctgagtgag

SEQ ID NO: 23371 - RNA, 49 nt, synthetic construct
  source 1..49: mol_type = other RNA
tttcccccaggtctacatgttcctggtgaaatggcaggacctgtcggag

SEQ ID NO: 23372 - RNA, 49 nt, synthetic construct
  source 1..49: mol_type = other RNA
tttcccccaggtctacatgttcctggtgaaatggcaggacctgagtgag

SEQ ID NO: 23373 - RNA, 49 nt, synthetic construct
  source 1..49: mol_type = other RNA
tttcccccaggtctacatgttcctggtgaaatggcaggacctgagcgag

SEQ ID NO: 23374 - RNA, 49 nt, synthetic construct
  source 1..49: mol_type = other RNA
tttcccccaggtatacatgttcctggtgaaatggcaggacctgtcggag

SEQ ID NO: 23375 - RNA, 49 nt, synthetic construct
  source 1..49: mol_type = other RNA
tttcccccaggtatacatgttcctggtgaaatggcaggacctgagtgag

SEQ ID NO: 23376 - RNA, 49 nt, synthetic construct
  source 1..49: mol_type = other RNA
tttcccccaggtttacatgttcctggtgaaatggcaggacctgagcgag

SEQ ID NO: 23377 - RNA, 49 nt, synthetic construct
  source 1..49: mol_type = other RNA
tttcccccaggtatacatgttcctggtgaaatggcaggacctgagcgag

SEQ ID NO: 23378 - RNA, 50 nt, synthetic construct
  source 1..50: mol_type = other RNA
ctttcccccaggtgtacatgttcctggtgaaatggcaggacctgtcggag

SEQ ID NO: 23379 - RNA, 50 nt, synthetic construct
  source 1..50: mol_type = other RNA
ctttcccccaggtttacatgttcctggtgaaatggcaggacctgagtgag

SEQ ID NO: 23380 - RNA, 50 nt, synthetic construct
  source 1..50: mol_type = other RNA
ctttcccccaggtttacatgttcctggtgaaatggcaggacctgtcggag

SEQ ID NO: 23381 - RNA, 50 nt, synthetic construct
  source 1..50: mol_type = other RNA
ctttcccccaggtgtacatgttcctggtgaaatggcaggacctgagtgag

SEQ ID NO: 23382 - RNA, 50 nt, synthetic construct
  source 1..50: mol_type = other RNA
ctttcccccaggtgtacatgttcctggtgaaatggcaggacctgagcgag

SEQ ID NO: 23383 - RNA, 50 nt, synthetic construct
  source 1..50: mol_type = other RNA
ctttcccccaggtatacatgttcctggtgaaatggcaggacctgagcgag

SEQ ID NO: 23384 - RNA, 50 nt, synthetic construct
  source 1..50: mol_type = other RNA
ctttcccccaggtctacatgttcctggtgaaatggcaggacctgagtgag

SEQ ID NO: 23385 - RNA, 50 nt, synthetic construct
  source 1..50: mol_type = other RNA
ctttcccccaggtctacatgttcctggtgaaatggcaggacctgagcgag

SEQ ID NO: 23386 - RNA, 50 nt, synthetic construct
  source 1..50: mol_type = other RNA
ctttcccccaggtatacatgttcctggtgaaatggcaggacctgtcggag

SEQ ID NO: 23387 - RNA, 50 nt, synthetic construct
  source 1..50: mol_type = other RNA
ctttcccccaggtatacatgttcctggtgaaatggcaggacctgagtgag

SEQ ID NO: 23388 - RNA, 50 nt, synthetic construct
  source 1..50: mol_type = other RNA
ctttcccccaggtctacatgttcctggtgaaatggcaggacctgtcggag

SEQ ID NO: 23389 - RNA, 50 nt, synthetic construct
  source 1..50: mol_type = other RNA
ctttcccccaggtttacatgttcctggtgaaatggcaggacctgagcgag

SEQ ID NO: 23390 - RNA, 51 nt, synthetic construct
  source 1..51: mol_type = other RNA
gctttcccccaggtatacatgttcctggtgaaatggcaggacctgagcgag

SEQ ID NO: 23391 - RNA, 51 nt, synthetic construct
  source 1..51: mol_type = other RNA
gctttcccccaggtctacatgttcctggtgaaatggcaggacctgagtgag

SEQ ID NO: 23392 - RNA, 51 nt, synthetic construct
  source 1..51: mol_type = other RNA
gctttcccccaggtgtacatgttcctggtgaaatggcaggacctgagtgag

SEQ ID NO: 23393 - RNA, 51 nt, synthetic construct
  source 1..51: mol_type = other RNA
gctttcccccaggtttacatgttcctggtgaaatggcaggacctgagtgag

SEQ ID NO: 23394 - RNA, 51 nt, synthetic construct
  source 1..51: mol_type = other RNA
gctttcccccaggtgtacatgttcctggtgaaatggcaggacctgagcgag

SEQ ID NO: 23395 - RNA, 51 nt, synthetic construct
  source 1..51: mol_type = other RNA
gctttcccccaggtctacatgttcctggtgaaatggcaggacctgtcggag

SEQ ID NO: 23396 - RNA, 51 nt, synthetic construct
  source 1..51: mol_type = other RNA
gctttcccccaggtttacatgttcctggtgaaatggcaggacctgagcgag

SEQ ID NO: 23397 - RNA, 51 nt, synthetic construct
  source 1..51: mol_type = other RNA
gctttcccccaggtctacatgttcctggtgaaatggcaggacctgagcgag

SEQ ID NO: 23398 - RNA, 51 nt, synthetic construct
  source 1..51: mol_type = other RNA
gctttcccccaggtatacatgttcctggtgaaatggcaggacctgagtgag

SEQ ID NO: 23399 - RNA, 51 nt, synthetic construct
  source 1..51: mol_type = other RNA
gctttcccccaggtatacatgttcctggtgaaatggcaggacctgtcggag

SEQ ID NO: 23400 - RNA, 51 nt, synthetic construct
  source 1..51: mol_type = other RNA
gctttcccccaggtgtacatgttcctggtgaaatggcaggacctgtcggag

SEQ ID NO: 23401 - RNA, 51 nt, synthetic construct
  source 1..51: mol_type = other RNA
gctttcccccaggtttacatgttcctggtgaaatggcaggacctgtcggag

SEQ ID NO: 23402 - RNA, 52 nt, synthetic construct
  source 1..52: mol_type = other RNA
ggctttcccccaggtatacatgttcctggtgaaatggcaggacctgtcggag

SEQ ID NO: 23403 - RNA, 52 nt, synthetic construct
  source 1..52: mol_type = other RNA
ggctttcccccaggtgtacatgttcctggtgaaatggcaggacctgagcgag

SEQ ID NO: 23404 - RNA, 52 nt, synthetic construct
  source 1..52: mol_type = other RNA
ggctttcccccaggtctacatgttcctggtgaaatggcaggacctgagtgag

SEQ ID NO: 23405 - RNA, 52 nt, synthetic construct
  source 1..52: mol_type = other RNA
ggctttcccccaggtatacatgttcctggtgaaatggcaggacctgagtgag

SEQ ID NO: 23406 - RNA, 52 nt, synthetic construct
  source 1..52: mol_type = other RNA
ggctttcccccaggtctacatgttcctggtgaaatggcaggacctgtcggag

SEQ ID NO: 23407 - RNA, 52 nt, synthetic construct
  source 1..52: mol_type = other RNA
ggctttcccccaggtttacatgttcctggtgaaatggcaggacctgtcggag

SEQ ID NO: 23408 - RNA, 52 nt, synthetic construct
  source 1..52: mol_type = other RNA
ggctttcccccaggtctacatgttcctggtgaaatggcaggacctgagcgag

SEQ ID NO: 23409 - RNA, 52 nt, synthetic construct
  source 1..52: mol_type = other RNA
ggctttcccccaggtttacatgttcctggtgaaatggcaggacctgagcgag

SEQ ID NO: 23410 - RNA, 52 nt, synthetic construct
  source 1..52: mol_type = other RNA
ggctttcccccaggtatacatgttcctggtgaaatggcaggacctgagcgag

SEQ ID NO: 23411 - RNA, 52 nt, synthetic construct
  source 1..52: mol_type = other RNA
ggctttcccccaggtgtacatgttcctggtgaaatggcaggacctgagtgag

SEQ ID NO: 23412 - RNA, 52 nt, synthetic construct
  source 1..52: mol_type = other RNA
ggctttcccccaggtttacatgttcctggtgaaatggcaggacctgagtgag

SEQ ID NO: 23413 - RNA, 52 nt, synthetic construct
  source 1..52: mol_type = other RNA
ggctttcccccaggtgtacatgttcctggtgaaatggcaggacctgtcggag

SEQ ID NO: 23414 - RNA, 53 nt, synthetic construct
  source 1..53: mol_type = other RNA
tggctttcccccaggtatacatgttcctggtgaaatggcaggacctgagcgag

SEQ ID NO: 23415 - RNA, 53 nt, synthetic construct
  source 1..53: mol_type = other RNA
tggctttcccccaggtgtacatgttcctggtgaaatggcaggacctgagcgag

SEQ ID NO: 23416 - RNA, 53 nt, synthetic construct
  source 1..53: mol_type = other RNA
tggctttcccccaggtatacatgttcctggtgaaatggcaggacctgagtgag

SEQ ID NO: 23417 - RNA, 53 nt, synthetic construct
  source 1..53: mol_type = other RNA
tggctttcccccaggtctacatgttcctggtgaaatggcaggacctgagcgag

SEQ ID NO: 23418 - RNA, 53 nt, synthetic construct
  source 1..53: mol_type = other RNA
tggctttcccccaggtctacatgttcctggtgaaatggcaggacctgagtgag

SEQ ID NO: 23419 - RNA, 53 nt, synthetic construct
  source 1..53: mol_type = other RNA
tggctttcccccaggtctacatgttcctggtgaaatggcaggacctgtcggag

SEQ ID NO: 23420 - RNA, 53 nt, synthetic construct
  source 1..53: mol_type = other RNA
tggctttcccccaggtttacatgttcctggtgaaatggcaggacctgagcgag

SEQ ID NO: 23421 - RNA, 53 nt, synthetic construct
  source 1..53: mol_type = other RNA
tggctttcccccaggtgtacatgttcctggtgaaatggcaggacctgagtgag

SEQ ID NO: 23422 - RNA, 53 nt, synthetic construct
  source 1..53: mol_type = other RNA
tggctttcccccaggtgtacatgttcctggtgaaatggcaggacctgtcggag

SEQ ID NO: 23423 - RNA, 53 nt, synthetic construct
  source 1..53: mol_type = other RNA
tggctttcccccaggtatacatgttcctggtgaaatggcaggacctgtcggag

SEQ ID NO: 23424 - RNA, 53 nt, synthetic construct
  source 1..53: mol_type = other RNA
tggctttcccccaggtttacatgttcctggtgaaatggcaggacctgagtgag

SEQ ID NO: 23425 - RNA, 53 nt, synthetic construct
  source 1..53: mol_type = other RNA
tggctttcccccaggtttacatgttcctggtgaaatggcaggacctgtcggag

SEQ ID NO: 23426 - RNA, 54 nt, synthetic construct
  source 1..54: mol_type = other RNA
ctggctttcccccaggtttacatgttcctggtgaaatggcaggacctgagcgag

SEQ ID NO: 23427 - RNA, 54 nt, synthetic construct
  source 1..54: mol_type = other RNA
ctggctttcccccaggtctacatgttcctggtgaaatggcaggacctgtcggag

SEQ ID NO: 23428 - RNA, 54 nt, synthetic construct
  source 1..54: mol_type = other RNA
ctggctttcccccaggtctacatgttcctggtgaaatggcaggacctgagtgag

SEQ ID NO: 23429 - RNA, 54 nt, synthetic construct
  source 1..54: mol_type = other RNA
ctggctttcccccaggtctacatgttcctggtgaaatggcaggacctgagcgag

SEQ ID NO: 23430 - RNA, 54 nt, synthetic construct
  source 1..54: mol_type = other RNA
ctggctttcccccaggtatacatgttcctggtgaaatggcaggacctgtcggag

SEQ ID NO: 23431 - RNA, 54 nt, synthetic construct
  source 1..54: mol_type = other RNA
ctggctttcccccaggtatacatgttcctggtgaaatggcaggacctgagcgag

SEQ ID NO: 23432 - RNA, 54 nt, synthetic construct
  source 1..54: mol_type = other RNA
ctggctttcccccaggtgtacatgttcctggtgaaatggcaggacctgagcgag

SEQ ID NO: 23433 - RNA, 54 nt, synthetic construct
  source 1..54: mol_type = other RNA
ctggctttcccccaggtgtacatgttcctggtgaaatggcaggacctgtcggag

SEQ ID NO: 23434 - RNA, 54 nt, synthetic construct
  source 1..54: mol_type = other RNA
ctggctttcccccaggtttacatgttcctggtgaaatggcaggacctgtcggag

SEQ ID NO: 23435 - RNA, 54 nt, synthetic construct
  source 1..54: mol_type = other RNA
ctggctttcccccaggtttacatgttcctggtgaaatggcaggacctgagtgag

SEQ ID NO: 23436 - RNA, 54 nt, synthetic construct
  source 1..54: mol_type = other RNA
ctggctttcccccaggtgtacatgttcctggtgaaatggcaggacctgagtgag

SEQ ID NO: 23437 - RNA, 54 nt, synthetic construct
  source 1..54: mol_type = other RNA
ctggctttcccccaggtatacatgttcctggtgaaatggcaggacctgagtgag

SEQ ID NO: 23438 - RNA, 55 nt, synthetic construct
  source 1..55: mol_type = other RNA
tctggctttcccccaggtgtacatgttcctggtgaaatggcaggacctgagtgag

SEQ ID NO: 23439 - RNA, 55 nt, synthetic construct
  source 1..55: mol_type = other RNA
tctggctttcccccaggtttacatgttcctggtgaaatggcaggacctgtcggag

SEQ ID NO: 23440 - RNA, 55 nt, synthetic construct
  source 1..55: mol_type = other RNA
tctggctttcccccaggtttacatgttcctggtgaaatggcaggacctgagtgag

SEQ ID NO: 23441 - RNA, 55 nt, synthetic construct
  source 1..55: mol_type = other RNA
tctggctttcccccaggtttacatgttcctggtgaaatggcaggacctgagcgag

SEQ ID NO: 23442 - RNA, 55 nt, synthetic construct
  source 1..55: mol_type = other RNA
tctggctttcccccaggtgtacatgttcctggtgaaatggcaggacctgtcggag

SEQ ID NO: 23443 - RNA, 55 nt, synthetic construct
  source 1..55: mol_type = other RNA
tctggctttcccccaggtctacatgttcctggtgaaatggcaggacctgagtgag

SEQ ID NO: 23444 - RNA, 55 nt, synthetic construct
  source 1..55: mol_type = other RNA
tctggctttcccccaggtatacatgttcctggtgaaatggcaggacctgagcgag

SEQ ID NO: 23445 - RNA, 55 nt, synthetic construct
  source 1..55: mol_type = other RNA
tctggctttcccccaggtatacatgttcctggtgaaatggcaggacctgagtgag

SEQ ID NO: 23446 - RNA, 55 nt, synthetic construct
  source 1..55: mol_type = other RNA
tctggctttcccccaggtctacatgttcctggtgaaatggcaggacctgagcgag

SEQ ID NO: 23447 - RNA, 55 nt, synthetic construct
  source 1..55: mol_type = other RNA
tctggctttcccccaggtatacatgttcctggtgaaatggcaggacctgtcggag

SEQ ID NO: 23448 - RNA, 55 nt, synthetic construct
  source 1..55: mol_type = other RNA
tctggctttcccccaggtctacatgttcctggtgaaatggcaggacctgtcggag

SEQ ID NO: 23449 - RNA, 55 nt, synthetic construct
  source 1..55: mol_type = other RNA
tctggctttcccccaggtgtacatgttcctggtgaaatggcaggacctgagcgag

SEQ ID NO: 23450 - RNA, 56 nt, synthetic construct
  source 1..56: mol_type = other RNA
ctctggctttcccccaggtttacatgttcctggtgaaatggcaggacctgagcgag

SEQ ID NO: 23451 - RNA, 56 nt, synthetic construct
  source 1..56: mol_type = other RNA
ctctggctttcccccaggtgtacatgttcctggtgaaatggcaggacctgagtgag

SEQ ID NO: 23452 - RNA, 56 nt, synthetic construct
  source 1..56: mol_type = other RNA
ctctggctttcccccaggtttacatgttcctggtgaaatggcaggacctgtcggag

SEQ ID NO: 23453 - RNA, 56 nt, synthetic construct
  source 1..56: mol_type = other RNA
ctctggctttcccccaggtgtacatgttcctggtgaaatggcaggacctgtcggag

SEQ ID NO: 23454 - RNA, 56 nt, synthetic construct
  source 1..56: mol_type = other RNA
ctctggctttcccccaggtttacatgttcctggtgaaatggcaggacctgagtgag

SEQ ID NO: 23455 - RNA, 56 nt, synthetic construct
  source 1..56: mol_type = other RNA
ctctggctttcccccaggtctacatgttcctggtgaaatggcaggacctgagtgag

SEQ ID NO: 23456 - RNA, 56 nt, synthetic construct
  source 1..56: mol_type = other RNA
ctctggctttcccccaggtctacatgttcctggtgaaatggcaggacctgagcgag

SEQ ID NO: 23457 - RNA, 56 nt, synthetic construct
  source 1..56: mol_type = other RNA
ctctggctttcccccaggtatacatgttcctggtgaaatggcaggacctgtcggag

SEQ ID NO: 23458 - RNA, 56 nt, synthetic construct
  source 1..56: mol_type = other RNA
ctctggctttcccccaggtctacatgttcctggtgaaatggcaggacctgtcggag

SEQ ID NO: 23459 - RNA, 56 nt, synthetic construct
  source 1..56: mol_type = other RNA
ctctggctttcccccaggtatacatgttcctggtgaaatggcaggacctgagcgag

SEQ ID NO: 23460 - RNA, 56 nt, synthetic construct
  source 1..56: mol_type = other RNA
ctctggctttcccccaggtgtacatgttcctggtgaaatggcaggacctgagcgag

SEQ ID NO: 23461 - RNA, 56 nt, synthetic construct
  source 1..56: mol_type = other RNA
ctctggctttcccccaggtatacatgttcctggtgaaatggcaggacctgagtgag

SEQ ID NO: 23462 - RNA, 57 nt, synthetic construct
  source 1..57: mol_type = other RNA
actctggctttcccccaggtatacatgttcctggtgaaatggcaggacctgagcgag

SEQ ID NO: 23463 - RNA, 57 nt, synthetic construct
  source 1..57: mol_type = other RNA
actctggctttcccccaggtatacatgttcctggtgaaatggcaggacctgagtgag

SEQ ID NO: 23464 - RNA, 57 nt, synthetic construct
  source 1..57: mol_type = other RNA
actctggctttcccccaggtttacatgttcctggtgaaatggcaggacctgtcggag

SEQ ID NO: 23465 - RNA, 57 nt, synthetic construct
  source 1..57: mol_type = other RNA
actctggctttcccccaggtttacatgttcctggtgaaatggcaggacctgagcgag

SEQ ID NO: 23466 - RNA, 57 nt, synthetic construct
  source 1..57: mol_type = other RNA
actctggctttcccccaggtgtacatgttcctggtgaaatggcaggacctgtcggag

SEQ ID NO: 23467 - RNA, 57 nt, synthetic construct
  source 1..57: mol_type = other RNA
actctggctttcccccaggtgtacatgttcctggtgaaatggcaggacctgagtgag

SEQ ID NO: 23468 - RNA, 57 nt, synthetic construct
  source 1..57: mol_type = other RNA
actctggctttcccccaggtttacatgttcctggtgaaatggcaggacctgagtgag

SEQ ID NO: 23469 - RNA, 57 nt, synthetic construct
  source 1..57: mol_type = other RNA
actctggctttcccccaggtgtacatgttcctggtgaaatggcaggacctgagcgag

SEQ ID NO: 23470 - RNA, 57 nt, synthetic construct
  source 1..57: mol_type = other RNA
actctggctttcccccaggtctacatgttcctggtgaaatggcaggacctgtcggag

SEQ ID NO: 23471 - RNA, 57 nt, synthetic construct
  source 1..57: mol_type = other RNA
actctggctttcccccaggtctacatgttcctggtgaaatggcaggacctgagcgag

SEQ ID NO: 23472 - RNA, 57 nt, synthetic construct
  source 1..57: mol_type = other RNA
actctggctttcccccaggtatacatgttcctggtgaaatggcaggacctgtcggag

SEQ ID NO: 23473 - RNA, 57 nt, synthetic construct
  source 1..57: mol_type = other RNA
actctggctttcccccaggtctacatgttcctggtgaaatggcaggacctgagtgag

SEQ ID NO: 23474 - RNA, 58 nt, synthetic construct
  source 1..58: mol_type = other RNA
gactctggctttcccccaggtttacatgttcctggtgaaatggcaggacctgagcgag

SEQ ID NO: 23475 - RNA, 58 nt, synthetic construct
  source 1..58: mol_type = other RNA
gactctggctttcccccaggtgtacatgttcctggtgaaatggcaggacctgtcggag

SEQ ID NO: 23476 - RNA, 58 nt, synthetic construct
  source 1..58: mol_type = other RNA
gactctggctttcccccaggtgtacatgttcctggtgaaatggcaggacctgagtgag

SEQ ID NO: 23477 - RNA, 58 nt, synthetic construct
  source 1..58: mol_type = other RNA
gactctggctttcccccaggtatacatgttcctggtgaaatggcaggacctgagtgag

SEQ ID NO: 23478 - RNA, 58 nt, synthetic construct
  source 1..58: mol_type = other RNA
gactctggctttcccccaggtctacatgttcctggtgaaatggcaggacctgtcggag

SEQ ID NO: 23479 - RNA, 58 nt, synthetic construct
  source 1..58: mol_type = other RNA
gactctggctttcccccaggtttacatgttcctggtgaaatggcaggacctgagtgag

SEQ ID NO: 23480 - RNA, 58 nt, synthetic construct
  source 1..58: mol_type = other RNA
gactctggctttcccccaggtatacatgttcctggtgaaatggcaggacctgtcggag

SEQ ID NO: 23481 - RNA, 58 nt, synthetic construct
  source 1..58: mol_type = other RNA
gactctggctttcccccaggtgtacatgttcctggtgaaatggcaggacctgagcgag

SEQ ID NO: 23482 - RNA, 58 nt, synthetic construct
  source 1..58: mol_type = other RNA
gactctggctttcccccaggtctacatgttcctggtgaaatggcaggacctgagtgag

SEQ ID NO: 23483 - RNA, 58 nt, synthetic construct
  source 1..58: mol_type = other RNA
gactctggctttcccccaggtttacatgttcctggtgaaatggcaggacctgtcggag

SEQ ID NO: 23484 - RNA, 58 nt, synthetic construct
  source 1..58: mol_type = other RNA
gactctggctttcccccaggtatacatgttcctggtgaaatggcaggacctgagcgag

SEQ ID NO: 23485 - RNA, 58 nt, synthetic construct
  source 1..58: mol_type = other RNA
gactctggctttcccccaggtctacatgttcctggtgaaatggcaggacctgagcgag

SEQ ID NO: 23486 - RNA, 59 nt, synthetic construct
  source 1..59: mol_type = other RNA
cgactctggctttcccccaggtgtacatgttcctggtgaaatggcaggacctgagtgag

SEQ ID NO: 23487 - RNA, 59 nt, synthetic construct
  source 1..59: mol_type = other RNA
cgactctggctttcccccaggtctacatgttcctggtgaaatggcaggacctgagtgag

SEQ ID NO: 23488 - RNA, 59 nt, synthetic construct
  source 1..59: mol_type = other RNA
cgactctggctttcccccaggtctacatgttcctggtgaaatggcaggacctgtcggag

SEQ ID NO: 23489 - RNA, 59 nt, synthetic construct
  source 1..59: mol_type = other RNA
cgactctggctttcccccaggtttacatgttcctggtgaaatggcaggacctgagcgag

SEQ ID NO: 23490 - RNA, 59 nt, synthetic construct
  source 1..59: mol_type = other RNA
cgactctggctttcccccaggtatacatgttcctggtgaaatggcaggacctgagtgag

SEQ ID NO: 23491 - RNA, 59 nt, synthetic construct
  source 1..59: mol_type = other RNA
cgactctggctttcccccaggtatacatgttcctggtgaaatggcaggacctgtcggag

SEQ ID NO: 23492 - RNA, 59 nt, synthetic construct
  source 1..59: mol_type = other RNA
cgactctggctttcccccaggtttacatgttcctggtgaaatggcaggacctgtcggag

SEQ ID NO: 23493 - RNA, 59 nt, synthetic construct
  source 1..59: mol_type = other RNA
cgactctggctttcccccaggtgtacatgttcctggtgaaatggcaggacctgagcgag

SEQ ID NO: 23494 - RNA, 59 nt, synthetic construct
  source 1..59: mol_type = other RNA
cgactctggctttcccccaggtatacatgttcctggtgaaatggcaggacctgagcgag

SEQ ID NO: 23495 - RNA, 59 nt, synthetic construct
  source 1..59: mol_type = other RNA
cgactctggctttcccccaggtctacatgttcctggtgaaatggcaggacctgagcgag

SEQ ID NO: 23496 - RNA, 59 nt, synthetic construct
  source 1..59: mol_type = other RNA
cgactctggctttcccccaggtgtacatgttcctggtgaaatggcaggacctgtcggag

SEQ ID NO: 23497 - RNA, 59 nt, synthetic construct
  source 1..59: mol_type = other RNA
cgactctggctttcccccaggtttacatgttcctggtgaaatggcaggacctgagtgag

SEQ ID NO: 23498 - RNA, 60 nt, synthetic construct
  source 1..60: mol_type = other RNA
ccgactctggctttcccccaggtgtacatgttcctggtgaaatggcaggacctgtcggag

SEQ ID NO: 23499 - RNA, 60 nt, synthetic construct
  source 1..60: mol_type = other RNA
ccgactctggctttcccccaggtatacatgttcctggtgaaatggcaggacctgagcgag

SEQ ID NO: 23500 - RNA, 60 nt, synthetic construct
  source 1..60: mol_type = other RNA
ccgactctggctttcccccaggtatacatgttcctggtgaaatggcaggacctgagtgag

SEQ ID NO: 23501 - RNA, 60 nt, synthetic construct
  source 1..60: mol_type = other RNA
ccgactctggctttcccccaggtatacatgttcctggtgaaatggcaggacctgtcggag

SEQ ID NO: 23502 - RNA, 60 nt, synthetic construct
  source 1..60: mol_type = other RNA
ccgactctggctttcccccaggtctacatgttcctggtgaaatggcaggacctgagtgag

SEQ ID NO: 23503 - RNA, 60 nt, synthetic construct
  source 1..60: mol_type = other RNA
ccgactctggctttcccccaggtctacatgttcctggtgaaatggcaggacctgtcggag

SEQ ID NO: 23504 - RNA, 60 nt, synthetic construct
  source 1..60: mol_type = other RNA
ccgactctggctttcccccaggtgtacatgttcctggtgaaatggcaggacctgagcgag

SEQ ID NO: 23505 - RNA, 60 nt, synthetic construct
  source 1..60: mol_type = other RNA
ccgactctggctttcccccaggtttacatgttcctggtgaaatggcaggacctgagcgag

SEQ ID NO: 23506 - RNA, 60 nt, synthetic construct
  source 1..60: mol_type = other RNA
ccgactctggctttcccccaggtttacatgttcctggtgaaatggcaggacctgagtgag

SEQ ID NO: 23507 - RNA, 60 nt, synthetic construct
  source 1..60: mol_type = other RNA
ccgactctggctttcccccaggtttacatgttcctggtgaaatggcaggacctgtcggag

SEQ ID NO: 23508 - RNA, 60 nt, synthetic construct
  source 1..60: mol_type = other RNA
ccgactctggctttcccccaggtgtacatgttcctggtgaaatggcaggacctgagtgag

SEQ ID NO: 23509 - RNA, 60 nt, synthetic construct
  source 1..60: mol_type = other RNA
ccgactctggctttcccccaggtctacatgttcctggtgaaatggcaggacctgagcgag

SEQ ID NO: 23510 - RNA, 61 nt, synthetic construct
  source 1..61: mol_type = other RNA
cccgactctggctttcccccaggtctacatgttcctggtgaaatggcaggacctgtcggag

SEQ ID NO: 23511 - RNA, 61 nt, synthetic construct
  source 1..61: mol_type = other RNA
cccgactctggctttcccccaggtgtacatgttcctggtgaaatggcaggacctgagcgag

SEQ ID NO: 23512 - RNA, 61 nt, synthetic construct
  source 1..61: mol_type = other RNA
cccgactctggctttcccccaggtgtacatgttcctggtgaaatggcaggacctgagtgag

SEQ ID NO: 23513 - RNA, 61 nt, synthetic construct
  source 1..61: mol_type = other RNA
cccgactctggctttcccccaggtttacatgttcctggtgaaatggcaggacctgagcgag

SEQ ID NO: 23514 - RNA, 61 nt, synthetic construct
  source 1..61: mol_type = other RNA
cccgactctggctttcccccaggtttacatgttcctggtgaaatggcaggacctgagtgag

SEQ ID NO: 23515 - RNA, 61 nt, synthetic construct
  source 1..61: mol_type = other RNA
cccgactctggctttcccccaggtttacatgttcctggtgaaatggcaggacctgtcggag

SEQ ID NO: 23516 - RNA, 61 nt, synthetic construct
  source 1..61: mol_type = other RNA
cccgactctggctttcccccaggtctacatgttcctggtgaaatggcaggacctgagtgag

SEQ ID NO: 23517 - RNA, 61 nt, synthetic construct
  source 1..61: mol_type = other RNA
cccgactctggctttcccccaggtctacatgttcctggtgaaatggcaggacctgagcgag

SEQ ID NO: 23518 - RNA, 61 nt, synthetic construct
  source 1..61: mol_type = other RNA
cccgactctggctttcccccaggtatacatgttcctggtgaaatggcaggacctgagtgag

SEQ ID NO: 23519 - RNA, 61 nt, synthetic construct
  source 1..61: mol_type = other RNA
cccgactctggctttcccccaggtatacatgttcctggtgaaatggcaggacctgtcggag

SEQ ID NO: 23520 - RNA, 61 nt, synthetic construct
  source 1..61: mol_type = other RNA
cccgactctggctttcccccaggtatacatgttcctggtgaaatggcaggacctgagcgag

SEQ ID NO: 23521 - RNA, 61 nt, synthetic construct
  source 1..61: mol_type = other RNA
cccgactctggctttcccccaggtgtacatgttcctggtgaaatggcaggacctgtcggag

SEQ ID NO: 23522 - RNA, 62 nt, synthetic construct
  source 1..62: mol_type = other RNA
ccccgactctggctttcccccaggtgtacatgttcctggtgaaatggcaggacctgagtgag

SEQ ID NO: 23523 - RNA, 62 nt, synthetic construct
  source 1..62: mol_type = other RNA
ccccgactctggctttcccccaggtttacatgttcctggtgaaatggcaggacctgagcgag

SEQ ID NO: 23524 - RNA, 62 nt, synthetic construct
  source 1..62: mol_type = other RNA
ccccgactctggctttcccccaggtatacatgttcctggtgaaatggcaggacctgagcgag

SEQ ID NO: 23525 - RNA, 62 nt, synthetic construct
  source 1..62: mol_type = other RNA
ccccgactctggctttcccccaggtgtacatgttcctggtgaaatggcaggacctgagcgag

SEQ ID NO: 23526 - RNA, 62 nt, synthetic construct
  source 1..62: mol_type = other RNA
ccccgactctggctttcccccaggtttacatgttcctggtgaaatggcaggacctgagtgag

SEQ ID NO: 23527 - RNA, 62 nt, synthetic construct
  source 1..62: mol_type = other RNA
ccccgactctggctttcccccaggtctacatgttcctggtgaaatggcaggacctgtcggag

SEQ ID NO: 23528 - RNA, 62 nt, synthetic construct
  source 1..62: mol_type = other RNA
ccccgactctggctttcccccaggtatacatgttcctggtgaaatggcaggacctgagtgag

SEQ ID NO: 23529 - RNA, 62 nt, synthetic construct
  source 1..62: mol_type = other RNA
ccccgactctggctttcccccaggtctacatgttcctggtgaaatggcaggacctgagcgag

SEQ ID NO: 23530 - RNA, 62 nt, synthetic construct
  source 1..62: mol_type = other RNA
ccccgactctggctttcccccaggtatacatgttcctggtgaaatggcaggacctgtcggag

SEQ ID NO: 23531 - RNA, 62 nt, synthetic construct
  source 1..62: mol_type = other RNA
ccccgactctggctttcccccaggtgtacatgttcctggtgaaatggcaggacctgtcggag

SEQ ID NO: 23532 - RNA, 62 nt, synthetic construct
  source 1..62: mol_type = other RNA
ccccgactctggctttcccccaggtttacatgttcctggtgaaatggcaggacctgtcggag

SEQ ID NO: 23533 - RNA, 62 nt, synthetic construct
  source 1..62: mol_type = other RNA
ccccgactctggctttcccccaggtctacatgttcctggtgaaatggcaggacctgagtgag

SEQ ID NO: 23534 - RNA, 63 nt, synthetic construct
  source 1..63: mol_type = other RNA
cccccgactctggctttcccccaggtgtacatgttcctggtgaaatggcaggacctgagcgag

SEQ ID NO: 23535 - RNA, 63 nt, synthetic construct
  source 1..63: mol_type = other RNA
cccccgactctggctttcccccaggtatacatgttcctggtgaaatggcaggacctgtcggag

SEQ ID NO: 23536 - RNA, 63 nt, synthetic construct
  source 1..63: mol_type = other RNA
cccccgactctggctttcccccaggtgtacatgttcctggtgaaatggcaggacctgagtgag

SEQ ID NO: 23537 - RNA, 63 nt, synthetic construct
  source 1..63: mol_type = other RNA
cccccgactctggctttcccccaggtgtacatgttcctggtgaaatggcaggacctgtcggag

SEQ ID NO: 23538 - RNA, 63 nt, synthetic construct
  source 1..63: mol_type = other RNA
cccccgactctggctttcccccaggtttacatgttcctggtgaaatggcaggacctgagtgag

SEQ ID NO: 23539 - RNA, 63 nt, synthetic construct
  source 1..63: mol_type = other RNA
cccccgactctggctttcccccaggtttacatgttcctggtgaaatggcaggacctgagcgag

SEQ ID NO: 23540 - RNA, 63 nt, synthetic construct
  source 1..63: mol_type = other RNA
cccccgactctggctttcccccaggtctacatgttcctggtgaaatggcaggacctgtcggag

SEQ ID NO: 23541 - RNA, 63 nt, synthetic construct
  source 1..63: mol_type = other RNA
cccccgactctggctttcccccaggtctacatgttcctggtgaaatggcaggacctgagcgag

SEQ ID NO: 23542 - RNA, 63 nt, synthetic construct
  source 1..63: mol_type = other RNA
cccccgactctggctttcccccaggtctacatgttcctggtgaaatggcaggacctgagtgag

SEQ ID NO: 23543 - RNA, 63 nt, synthetic construct
  source 1..63: mol_type = other RNA
cccccgactctggctttcccccaggtatacatgttcctggtgaaatggcaggacctgagcgag

SEQ ID NO: 23544 - RNA, 63 nt, synthetic construct
  source 1..63: mol_type = other RNA
cccccgactctggctttcccccaggtatacatgttcctggtgaaatggcaggacctgagtgag

SEQ ID NO: 23545 - RNA, 63 nt, synthetic construct
  source 1..63: mol_type = other RNA
cccccgactctggctttcccccaggtttacatgttcctggtgaaatggcaggacctgtcggag

SEQ ID NO: 23546 - RNA, 64 nt, synthetic construct
  source 1..64: mol_type = other RNA
tcccccgactctggctttcccccaggtatacatgttcctggtgaaatggcaggacctgagcgag

SEQ ID NO: 23547 - RNA, 64 nt, synthetic construct
  source 1..64: mol_type = other RNA
tcccccgactctggctttcccccaggtctacatgttcctggtgaaatggcaggacctgagtgag

SEQ ID NO: 23548 - RNA, 64 nt, synthetic construct
  source 1..64: mol_type = other RNA
tcccccgactctggctttcccccaggtctacatgttcctggtgaaatggcaggacctgagcgag

SEQ ID NO: 23549 - RNA, 64 nt, synthetic construct
  source 1..64: mol_type = other RNA
tcccccgactctggctttcccccaggtgtacatgttcctggtgaaatggcaggacctgtcggag

SEQ ID NO: 23550 - RNA, 64 nt, synthetic construct
  source 1..64: mol_type = other RNA
tcccccgactctggctttcccccaggtatacatgttcctggtgaaatggcaggacctgagtgag

SEQ ID NO: 23551 - RNA, 64 nt, synthetic construct
  source 1..64: mol_type = other RNA
tcccccgactctggctttcccccaggtgtacatgttcctggtgaaatggcaggacctgagtgag

SEQ ID NO: 23552 - RNA, 64 nt, synthetic construct
  source 1..64: mol_type = other RNA
tcccccgactctggctttcccccaggtttacatgttcctggtgaaatggcaggacctgagcgag

SEQ ID NO: 23553 - RNA, 64 nt, synthetic construct
  source 1..64: mol_type = other RNA
tcccccgactctggctttcccccaggtttacatgttcctggtgaaatggcaggacctgagtgag

SEQ ID NO: 23554 - RNA, 64 nt, synthetic construct
  source 1..64: mol_type = other RNA
tcccccgactctggctttcccccaggtgtacatgttcctggtgaaatggcaggacctgagcgag

SEQ ID NO: 23555 - RNA, 64 nt, synthetic construct
  source 1..64: mol_type = other RNA
tcccccgactctggctttcccccaggtttacatgttcctggtgaaatggcaggacctgtcggag

SEQ ID NO: 23556 - RNA, 64 nt, synthetic construct
  source 1..64: mol_type = other RNA
tcccccgactctggctttcccccaggtatacatgttcctggtgaaatggcaggacctgtcggag

SEQ ID NO: 23557 - RNA, 64 nt, synthetic construct
  source 1..64: mol_type = other RNA
tcccccgactctggctttcccccaggtctacatgttcctggtgaaatggcaggacctgtcggag

SEQ ID NO: 23558 - RNA, 65 nt, synthetic construct
  source 1..65: mol_type = other RNA
gtcccccgactctggctttcccccaggtatacatgttcctggtgaaatggcaggacctgagtgag

SEQ ID NO: 23559 - RNA, 65 nt, synthetic construct
  source 1..65: mol_type = other RNA
gtcccccgactctggctttcccccaggtctacatgttcctggtgaaatggcaggacctgagcgag

SEQ ID NO: 23560 - RNA, 65 nt, synthetic construct
  source 1..65: mol_type = other RNA
gtcccccgactctggctttcccccaggtctacatgttcctggtgaaatggcaggacctgagtgag

SEQ ID NO: 23561 - RNA, 65 nt, synthetic construct
  source 1..65: mol_type = other RNA
gtcccccgactctggctttcccccaggtgtacatgttcctggtgaaatggcaggacctgagcgag

SEQ ID NO: 23562 - RNA, 65 nt, synthetic construct
  source 1..65: mol_type = other RNA
gtcccccgactctggctttcccccaggtttacatgttcctggtgaaatggcaggacctgagtgag

SEQ ID NO: 23563 - RNA, 65 nt, synthetic construct
  source 1..65: mol_type = other RNA
gtcccccgactctggctttcccccaggtttacatgttcctggtgaaatggcaggacctgagcgag

SEQ ID NO: 23564 - RNA, 65 nt, synthetic construct
  source 1..65: mol_type = other RNA
gtcccccgactctggctttcccccaggtgtacatgttcctggtgaaatggcaggacctgagtgag

SEQ ID NO: 23565 - RNA, 65 nt, synthetic construct
  source 1..65: mol_type = other RNA
gtcccccgactctggctttcccccaggtttacatgttcctggtgaaatggcaggacctgtcggag

SEQ ID NO: 23566 - RNA, 65 nt, synthetic construct
  source 1..65: mol_type = other RNA
gtcccccgactctggctttcccccaggtatacatgttcctggtgaaatggcaggacctgagcgag

SEQ ID NO: 23567 - RNA, 65 nt, synthetic construct
  source 1..65: mol_type = other RNA
gtcccccgactctggctttcccccaggtgtacatgttcctggtgaaatggcaggacctgtcggag

SEQ ID NO: 23568 - RNA, 65 nt, synthetic construct
  source 1..65: mol_type = other RNA
gtcccccgactctggctttcccccaggtctacatgttcctggtgaaatggcaggacctgtcggag

SEQ ID NO: 23569 - RNA, 65 nt, synthetic construct
  source 1..65: mol_type = other RNA
gtcccccgactctggctttcccccaggtatacatgttcctggtgaaatggcaggacctgtcggag

SEQ ID NO: 23570 - RNA, 66 nt, synthetic construct
  source 1..66: mol_type = other RNA
ggtcccccgactctggctttcccccaggtctacatgttcctggtgaaatggcaggacctgagtgag

SEQ ID NO: 23571 - RNA, 66 nt, synthetic construct
  source 1..66: mol_type = other RNA
ggtcccccgactctggctttcccccaggtatacatgttcctggtgaaatggcaggacctgagcgag

SEQ ID NO: 23572 - RNA, 66 nt, synthetic construct
  source 1..66: mol_type = other RNA
ggtcccccgactctggctttcccccaggtttacatgttcctggtgaaatggcaggacctgagtgag

SEQ ID NO: 23573 - RNA, 66 nt, synthetic construct
  source 1..66: mol_type = other RNA
ggtcccccgactctggctttcccccaggtctacatgttcctggtgaaatggcaggacctgtcggag

SEQ ID NO: 23574 - RNA, 66 nt, synthetic construct
  source 1..66: mol_type = other RNA
ggtcccccgactctggctttcccccaggtttacatgttcctggtgaaatggcaggacctgagcgag

SEQ ID NO: 23575 - RNA, 66 nt, synthetic construct
  source 1..66: mol_type = other RNA
ggtcccccgactctggctttcccccaggtgtacatgttcctggtgaaatggcaggacctgtcggag

SEQ ID NO: 23576 - RNA, 66 nt, synthetic construct
  source 1..66: mol_type = other RNA
ggtcccccgactctggctttcccccaggtgtacatgttcctggtgaaatggcaggacctgagtgag

SEQ ID NO: 23577 - RNA, 66 nt, synthetic construct
  source 1..66: mol_type = other RNA
ggtcccccgactctggctttcccccaggtgtacatgttcctggtgaaatggcaggacctgagcgag

SEQ ID NO: 23578 - RNA, 66 nt, synthetic construct
  source 1..66: mol_type = other RNA
ggtcccccgactctggctttcccccaggtctacatgttcctggtgaaatggcaggacctgagcgag

SEQ ID NO: 23579 - RNA, 66 nt, synthetic construct
  source 1..66: mol_type = other RNA
ggtcccccgactctggctttcccccaggtttacatgttcctggtgaaatggcaggacctgtcggag

SEQ ID NO: 23580 - RNA, 66 nt, synthetic construct
  source 1..66: mol_type = other RNA
ggtcccccgactctggctttcccccaggtatacatgttcctggtgaaatggcaggacctgtcggag

SEQ ID NO: 23581 - RNA, 66 nt, synthetic construct
  source 1..66: mol_type = other RNA
ggtcccccgactctggctttcccccaggtatacatgttcctggtgaaatggcaggacctgagtgag

SEQ ID NO: 23582 - RNA, 67 nt, synthetic construct
  source 1..67: mol_type = other RNA
gggtcccccgactctggctttcccccaggtgtacatgttcctggtgaaatggcaggacctgtcggag

SEQ ID NO: 23583 - RNA, 67 nt, synthetic construct
  source 1..67: mol_type = other RNA
gggtcccccgactctggctttcccccaggtatacatgttcctggtgaaatggcaggacctgagcgag

SEQ ID NO: 23584 - RNA, 67 nt, synthetic construct
  source 1..67: mol_type = other RNA
gggtcccccgactctggctttcccccaggtatacatgttcctggtgaaatggcaggacctgtcggag

SEQ ID NO: 23585 - RNA, 67 nt, synthetic construct
  source 1..67: mol_type = other RNA
gggtcccccgactctggctttcccccaggtctacatgttcctggtgaaatggcaggacctgagcgag

SEQ ID NO: 23586 - RNA, 67 nt, synthetic construct
  source 1..67: mol_type = other RNA
gggtcccccgactctggctttcccccaggtgtacatgttcctggtgaaatggcaggacctgagtgag

SEQ ID NO: 23587 - RNA, 67 nt, synthetic construct
  source 1..67: mol_type = other RNA
gggtcccccgactctggctttcccccaggtgtacatgttcctggtgaaatggcaggacctgagcgag

SEQ ID NO: 23588 - RNA, 67 nt, synthetic construct
  source 1..67: mol_type = other RNA
gggtcccccgactctggctttcccccaggtttacatgttcctggtgaaatggcaggacctgagtgag

SEQ ID NO: 23589 - RNA, 67 nt, synthetic construct
  source 1..67: mol_type = other RNA
gggtcccccgactctggctttcccccaggtttacatgttcctggtgaaatggcaggacctgtcggag

SEQ ID NO: 23590 - RNA, 67 nt, synthetic construct
  source 1..67: mol_type = other RNA
gggtcccccgactctggctttcccccaggtttacatgttcctggtgaaatggcaggacctgagcgag

SEQ ID NO: 23591 - RNA, 67 nt, synthetic construct
  source 1..67: mol_type = other RNA
gggtcccccgactctggctttcccccaggtctacatgttcctggtgaaatggcaggacctgagtgag

SEQ ID NO: 23592 - RNA, 67 nt, synthetic construct
  source 1..67: mol_type = other RNA
gggtcccccgactctggctttcccccaggtctacatgttcctggtgaaatggcaggacctgtcggag

SEQ ID NO: 23593 - RNA, 67 nt, synthetic construct
  source 1..67: mol_type = other RNA
gggtcccccgactctggctttcccccaggtatacatgttcctggtgaaatggcaggacctgagtgag

SEQ ID NO: 23594 - RNA, 68 nt, synthetic construct
  source 1..68: mol_type = other RNA
ggggtcccccgactctggctttcccccaggtatacatgttcctggtgaaatggcaggacctgagcgag

SEQ ID NO: 23595 - RNA, 68 nt, synthetic construct
  source 1..68: mol_type = other RNA
ggggtcccccgactctggctttcccccaggtgtacatgttcctggtgaaatggcaggacctgagcgag

SEQ ID NO: 23596 - RNA, 68 nt, synthetic construct
  source 1..68: mol_type = other RNA
ggggtcccccgactctggctttcccccaggtctacatgttcctggtgaaatggcaggacctgagcgag

SEQ ID NO: 23597 - RNA, 68 nt, synthetic construct
  source 1..68: mol_type = other RNA
ggggtcccccgactctggctttcccccaggtttacatgttcctggtgaaatggcaggacctgagcgag

SEQ ID NO: 23598 - RNA, 68 nt, synthetic construct
  source 1..68: mol_type = other RNA
ggggtcccccgactctggctttcccccaggtatacatgttcctggtgaaatggcaggacctgtcggag

SEQ ID NO: 23599 - RNA, 68 nt, synthetic construct
  source 1..68: mol_type = other RNA
ggggtcccccgactctggctttcccccaggtttacatgttcctggtgaaatggcaggacctgtcggag

SEQ ID NO: 23600 - RNA, 68 nt, synthetic construct
  source 1..68: mol_type = other RNA
ggggtcccccgactctggctttcccccaggtttacatgttcctggtgaaatggcaggacctgagtgag

SEQ ID NO: 23601 - RNA, 68 nt, synthetic construct
  source 1..68: mol_type = other RNA
ggggtcccccgactctggctttcccccaggtgtacatgttcctggtgaaatggcaggacctgtcggag

SEQ ID NO: 23602 - RNA, 68 nt, synthetic construct
  source 1..68: mol_type = other RNA
ggggtcccccgactctggctttcccccaggtgtacatgttcctggtgaaatggcaggacctgagtgag

SEQ ID NO: 23603 - RNA, 68 nt, synthetic construct
  source 1..68: mol_type = other RNA
ggggtcccccgactctggctttcccccaggtatacatgttcctggtgaaatggcaggacctgagtgag

SEQ ID NO: 23604 - RNA, 68 nt, synthetic construct
  source 1..68: mol_type = other RNA
ggggtcccccgactctggctttcccccaggtctacatgttcctggtgaaatggcaggacctgtcggag

SEQ ID NO: 23605 - RNA, 68 nt, synthetic construct
  source 1..68: mol_type = other RNA
ggggtcccccgactctggctttcccccaggtctacatgttcctggtgaaatggcaggacctgagtgag

SEQ ID NO: 23606 - RNA, 69 nt, synthetic construct
  source 1..69: mol_type = other RNA
tggggtcccccgactctggctttcccccaggtgtacatgttcctggtgaaatggcaggacctgagcgag

SEQ ID NO: 23607 - RNA, 69 nt, synthetic construct
  source 1..69: mol_type = other RNA
tggggtcccccgactctggctttcccccaggtatacatgttcctggtgaaatggcaggacctgagcgag

SEQ ID NO: 23608 - RNA, 69 nt, synthetic construct
  source 1..69: mol_type = other RNA
tggggtcccccgactctggctttcccccaggtttacatgttcctggtgaaatggcaggacctgtcggag

SEQ ID NO: 23609 - RNA, 69 nt, synthetic construct
  source 1..69: mol_type = other RNA
tggggtcccccgactctggctttcccccaggtttacatgttcctggtgaaatggcaggacctgagtgag

SEQ ID NO: 23610 - RNA, 69 nt, synthetic construct
  source 1..69: mol_type = other RNA
tggggtcccccgactctggctttcccccaggtttacatgttcctggtgaaatggcaggacctgagcgag

SEQ ID NO: 23611 - RNA, 69 nt, synthetic construct
  source 1..69: mol_type = other RNA
tggggtcccccgactctggctttcccccaggtgtacatgttcctggtgaaatggcaggacctgagtgag

SEQ ID NO: 23612 - RNA, 69 nt, synthetic construct
  source 1..69: mol_type = other RNA
tggggtcccccgactctggctttcccccaggtgtacatgttcctggtgaaatggcaggacctgtcggag

SEQ ID NO: 23613 - RNA, 69 nt, synthetic construct
  source 1..69: mol_type = other RNA
tggggtcccccgactctggctttcccccaggtctacatgttcctggtgaaatggcaggacctgagcgag

SEQ ID NO: 23614 - RNA, 69 nt, synthetic construct
  source 1..69: mol_type = other RNA
tggggtcccccgactctggctttcccccaggtatacatgttcctggtgaaatggcaggacctgtcggag

SEQ ID NO: 23615 - RNA, 69 nt, synthetic construct
  source 1..69: mol_type = other RNA
tggggtcccccgactctggctttcccccaggtatacatgttcctggtgaaatggcaggacctgagtgag

SEQ ID NO: 23616 - RNA, 69 nt, synthetic construct
  source 1..69: mol_type = other RNA
tggggtcccccgactctggctttcccccaggtctacatgttcctggtgaaatggcaggacctgtcggag

SEQ ID NO: 23617 - RNA, 69 nt, synthetic construct
  source 1..69: mol_type = other RNA
tggggtcccccgactctggctttcccccaggtctacatgttcctggtgaaatggcaggacctgagtgag

SEQ ID NO: 23618 - RNA, 70 nt, synthetic construct
  source 1..70: mol_type = other RNA
atggggtcccccgactctggctttcccccaggtctacatgttcctggtgaaatggcaggacctgagtgag

SEQ ID NO: 23619 - RNA, 70 nt, synthetic construct
  source 1..70: mol_type = other RNA
atggggtcccccgactctggctttcccccaggtctacatgttcctggtgaaatggcaggacctgtcggag

SEQ ID NO: 23620 - RNA, 70 nt, synthetic construct
  source 1..70: mol_type = other RNA
atggggtcccccgactctggctttcccccaggtatacatgttcctggtgaaatggcaggacctgagcgag

SEQ ID NO: 23621 - RNA, 70 nt, synthetic construct
  source 1..70: mol_type = other RNA
atggggtcccccgactctggctttcccccaggtatacatgttcctggtgaaatggcaggacctgagtgag

SEQ ID NO: 23622 - RNA, 70 nt, synthetic construct
  source 1..70: mol_type = other RNA
atggggtcccccgactctggctttcccccaggtatacatgttcctggtgaaatggcaggacctgtcggag

SEQ ID NO: 23623 - RNA, 70 nt, synthetic construct
  source 1..70: mol_type = other RNA
atggggtcccccgactctggctttcccccaggtctacatgttcctggtgaaatggcaggacctgagcgag

SEQ ID NO: 23624 - RNA, 70 nt, synthetic construct
  source 1..70: mol_type = other RNA
atggggtcccccgactctggctttcccccaggtgtacatgttcctggtgaaatggcaggacctgagcgag

SEQ ID NO: 23625 - RNA, 70 nt, synthetic construct
  source 1..70: mol_type = other RNA
atggggtcccccgactctggctttcccccaggtttacatgttcctggtgaaatggcaggacctgagcgag

SEQ ID NO: 23626 - RNA, 70 nt, synthetic construct
  source 1..70: mol_type = other RNA
atggggtcccccgactctggctttcccccaggtttacatgttcctggtgaaatggcaggacctgagtgag

SEQ ID NO: 23627 - RNA, 70 nt, synthetic construct
  source 1..70: mol_type = other RNA
atggggtcccccgactctggctttcccccaggtttacatgttcctggtgaaatggcaggacctgtcggag

SEQ ID NO: 23628 - RNA, 70 nt, synthetic construct
  source 1..70: mol_type = other RNA
atggggtcccccgactctggctttcccccaggtgtacatgttcctggtgaaatggcaggacctgagtgag

SEQ ID NO: 23629 - RNA, 70 nt, synthetic construct
  source 1..70: mol_type = other RNA
atggggtcccccgactctggctttcccccaggtgtacatgttcctggtgaaatggcaggacctgtcggag

SEQ ID NO: 23630 - RNA, 71 nt, synthetic construct
  source 1..71: mol_type = other RNA
aatggggtcccccgactctggctttcccccaggtttacatgttcctggtgaaatggcaggacctgagcgag

SEQ ID NO: 23631 - RNA, 71 nt, synthetic construct
  source 1..71: mol_type = other RNA
aatggggtcccccgactctggctttcccccaggtgtacatgttcctggtgaaatggcaggacctgtcggag

SEQ ID NO: 23632 - RNA, 71 nt, synthetic construct
  source 1..71: mol_type = other RNA
aatggggtcccccgactctggctttcccccaggtctacatgttcctggtgaaatggcaggacctgagcgag

SEQ ID NO: 23633 - RNA, 71 nt, synthetic construct
  source 1..71: mol_type = other RNA
aatggggtcccccgactctggctttcccccaggtatacatgttcctggtgaaatggcaggacctgtcggag

SEQ ID NO: 23634 - RNA, 71 nt, synthetic construct
  source 1..71: mol_type = other RNA
aatggggtcccccgactctggctttcccccaggtatacatgttcctggtgaaatggcaggacctgagtgag

SEQ ID NO: 23635 - RNA, 71 nt, synthetic construct
  source 1..71: mol_type = other RNA
aatggggtcccccgactctggctttcccccaggtatacatgttcctggtgaaatggcaggacctgagcgag

SEQ ID NO: 23636 - RNA, 71 nt, synthetic construct
  source 1..71: mol_type = other RNA
aatggggtcccccgactctggctttcccccaggtctacatgttcctggtgaaatggcaggacctgagtgag

SEQ ID NO: 23637 - RNA, 71 nt, synthetic construct
  source 1..71: mol_type = other RNA
aatggggtcccccgactctggctttcccccaggtgtacatgttcctggtgaaatggcaggacctgagcgag

SEQ ID NO: 23638 - RNA, 71 nt, synthetic construct
  source 1..71: mol_type = other RNA
aatggggtcccccgactctggctttcccccaggtgtacatgttcctggtgaaatggcaggacctgagtgag

SEQ ID NO: 23639 - RNA, 71 nt, synthetic construct
  source 1..71: mol_type = other RNA
aatggggtcccccgactctggctttcccccaggtttacatgttcctggtgaaatggcaggacctgagtgag

SEQ ID NO: 23640 - RNA, 71 nt, synthetic construct
  source 1..71: mol_type = other RNA
aatggggtcccccgactctggctttcccccaggtttacatgttcctggtgaaatggcaggacctgtcggag

SEQ ID NO: 23641 - RNA, 71 nt, synthetic construct
  source 1..71: mol_type = other RNA
aatggggtcccccgactctggctttcccccaggtctacatgttcctggtgaaatggcaggacctgtcggag

SEQ ID NO: 23642 - RNA, 72 nt, synthetic construct
  source 1..72: mol_type = other RNA
gaatggggtcccccgactctggctttcccccaggtgtacatgttcctggtgaaatggcaggacctgagcgag

SEQ ID NO: 23643 - RNA, 72 nt, synthetic construct
  source 1..72: mol_type = other RNA
gaatggggtcccccgactctggctttcccccaggtttacatgttcctggtgaaatggcaggacctgagtgag

SEQ ID NO: 23644 - RNA, 72 nt, synthetic construct
  source 1..72: mol_type = other RNA
gaatggggtcccccgactctggctttcccccaggtctacatgttcctggtgaaatggcaggacctgtcggag

SEQ ID NO: 23645 - RNA, 72 nt, synthetic construct
  source 1..72: mol_type = other RNA
gaatggggtcccccgactctggctttcccccaggtctacatgttcctggtgaaatggcaggacctgagcgag

SEQ ID NO: 23646 - RNA, 72 nt, synthetic construct
  source 1..72: mol_type = other RNA
gaatggggtcccccgactctggctttcccccaggtatacatgttcctggtgaaatggcaggacctgagcgag

SEQ ID NO: 23647 - RNA, 72 nt, synthetic construct
  source 1..72: mol_type = other RNA
gaatggggtcccccgactctggctttcccccaggtatacatgttcctggtgaaatggcaggacctgagtgag

SEQ ID NO: 23648 - RNA, 72 nt, synthetic construct
  source 1..72: mol_type = other RNA
gaatggggtcccccgactctggctttcccccaggtctacatgttcctggtgaaatggcaggacctgagtgag

SEQ ID NO: 23649 - RNA, 72 nt, synthetic construct
  source 1..72: mol_type = other RNA
gaatggggtcccccgactctggctttcccccaggtttacatgttcctggtgaaatggcaggacctgagcgag

SEQ ID NO: 23650 - RNA, 72 nt, synthetic construct
  source 1..72: mol_type = other RNA
gaatggggtcccccgactctggctttcccccaggtatacatgttcctggtgaaatggcaggacctgtcggag

SEQ ID NO: 23651 - RNA, 72 nt, synthetic construct
  source 1..72: mol_type = other RNA
gaatggggtcccccgactctggctttcccccaggtgtacatgttcctggtgaaatggcaggacctgagtgag

SEQ ID NO: 23652 - RNA, 72 nt, synthetic construct
  source 1..72: mol_type = other RNA
gaatggggtcccccgactctggctttcccccaggtttacatgttcctggtgaaatggcaggacctgtcggag

SEQ ID NO: 23653 - RNA, 72 nt, synthetic construct
  source 1..72: mol_type = other RNA
gaatggggtcccccgactctggctttcccccaggtgtacatgttcctggtgaaatggcaggacctgtcggag

SEQ ID NO: 23654 - RNA, 73 nt, synthetic construct
  source 1..73: mol_type = other RNA
tgaatggggtcccccgactctggctttcccccaggtgtacatgttcctggtgaaatggcaggacctgagcgag

SEQ ID NO: 23655 - RNA, 73 nt, synthetic construct
  source 1..73: mol_type = other RNA
tgaatggggtcccccgactctggctttcccccaggtgtacatgttcctggtgaaatggcaggacctgtcggag

SEQ ID NO: 23656 - RNA, 73 nt, synthetic construct
  source 1..73: mol_type = other RNA
tgaatggggtcccccgactctggctttcccccaggtatacatgttcctggtgaaatggcaggacctgagcgag

SEQ ID NO: 23657 - RNA, 73 nt, synthetic construct
  source 1..73: mol_type = other RNA
tgaatggggtcccccgactctggctttcccccaggtatacatgttcctggtgaaatggcaggacctgtcggag

SEQ ID NO: 23658 - RNA, 73 nt, synthetic construct
  source 1..73: mol_type = other RNA
tgaatggggtcccccgactctggctttcccccaggtctacatgttcctggtgaaatggcaggacctgagcgag

SEQ ID NO: 23659 - RNA, 73 nt, synthetic construct
  source 1..73: mol_type = other RNA
tgaatggggtcccccgactctggctttcccccaggtctacatgttcctggtgaaatggcaggacctgagtgag

SEQ ID NO: 23660 - RNA, 73 nt, synthetic construct
  source 1..73: mol_type = other RNA
tgaatggggtcccccgactctggctttcccccaggtctacatgttcctggtgaaatggcaggacctgtcggag

SEQ ID NO: 23661 - RNA, 73 nt, synthetic construct
  source 1..73: mol_type = other RNA
tgaatggggtcccccgactctggctttcccccaggtgtacatgttcctggtgaaatggcaggacctgagtgag

SEQ ID NO: 23662 - RNA, 73 nt, synthetic construct
  source 1..73: mol_type = other RNA
tgaatggggtcccccgactctggctttcccccaggtttacatgttcctggtgaaatggcaggacctgagcgag

SEQ ID NO: 23663 - RNA, 73 nt, synthetic construct
  source 1..73: mol_type = other RNA
tgaatggggtcccccgactctggctttcccccaggtttacatgttcctggtgaaatggcaggacctgagtgag

SEQ ID NO: 23664 - RNA, 73 nt, synthetic construct
  source 1..73: mol_type = other RNA
tgaatggggtcccccgactctggctttcccccaggtttacatgttcctggtgaaatggcaggacctgtcggag

SEQ ID NO: 23665 - RNA, 73 nt, synthetic construct
  source 1..73: mol_type = other RNA
tgaatggggtcccccgactctggctttcccccaggtatacatgttcctggtgaaatggcaggacctgagtgag

SEQ ID NO: 23666 - RNA, 74 nt, synthetic construct
  source 1..74: mol_type = other RNA
ctgaatggggtcccccgactctggctttcccccaggtttacatgttcctggtgaaatggcaggacctgagtgag

SEQ ID NO: 23667 - RNA, 74 nt, synthetic construct
  source 1..74: mol_type = other RNA
ctgaatggggtcccccgactctggctttcccccaggtttacatgttcctggtgaaatggcaggacctgtcggag

SEQ ID NO: 23668 - RNA, 74 nt, synthetic construct
  source 1..74: mol_type = other RNA
ctgaatggggtcccccgactctggctttcccccaggtttacatgttcctggtgaaatggcaggacctgagcgag

SEQ ID NO: 23669 - RNA, 74 nt, synthetic construct
  source 1..74: mol_type = other RNA
ctgaatggggtcccccgactctggctttcccccaggtgtacatgttcctggtgaaatggcaggacctgtcggag

SEQ ID NO: 23670 - RNA, 74 nt, synthetic construct
  source 1..74: mol_type = other RNA
ctgaatggggtcccccgactctggctttcccccaggtctacatgttcctggtgaaatggcaggacctgagtgag

SEQ ID NO: 23671 - RNA, 74 nt, synthetic construct
  source 1..74: mol_type = other RNA
ctgaatggggtcccccgactctggctttcccccaggtgtacatgttcctggtgaaatggcaggacctgagtgag

SEQ ID NO: 23672 - RNA, 74 nt, synthetic construct
  source 1..74: mol_type = other RNA
ctgaatggggtcccccgactctggctttcccccaggtatacatgttcctggtgaaatggcaggacctgagtgag

SEQ ID NO: 23673 - RNA, 74 nt, synthetic construct
  source 1..74: mol_type = other RNA
ctgaatggggtcccccgactctggctttcccccaggtctacatgttcctggtgaaatggcaggacctgtcggag

SEQ ID NO: 23674 - RNA, 74 nt, synthetic construct
  source 1..74: mol_type = other RNA
ctgaatggggtcccccgactctggctttcccccaggtctacatgttcctggtgaaatggcaggacctgagcgag

SEQ ID NO: 23675 - RNA, 74 nt, synthetic construct
  source 1..74: mol_type = other RNA
ctgaatggggtcccccgactctggctttcccccaggtatacatgttcctggtgaaatggcaggacctgtcggag

SEQ ID NO: 23676 - RNA, 74 nt, synthetic construct
  source 1..74: mol_type = other RNA
ctgaatggggtcccccgactctggctttcccccaggtatacatgttcctggtgaaatggcaggacctgagcgag

SEQ ID NO: 23677 - RNA, 74 nt, synthetic construct
  source 1..74: mol_type = other RNA
ctgaatggggtcccccgactctggctttcccccaggtgtacatgttcctggtgaaatggcaggacctgagcgag

SEQ ID NO: 23678 - RNA, 75 nt, synthetic construct
  source 1..75: mol_type = other RNA
gctgaatggggtcccccgactctggctttcccccaggtttacatgttcctggtgaaatggcaggacctgtcggag

SEQ ID NO: 23679 - RNA, 75 nt, synthetic construct
  source 1..75: mol_type = other RNA
gctgaatggggtcccccgactctggctttcccccaggtgtacatgttcctggtgaaatggcaggacctgagtgag

SEQ ID NO: 23680 - RNA, 75 nt, synthetic construct
  source 1..75: mol_type = other RNA
gctgaatggggtcccccgactctggctttcccccaggtttacatgttcctggtgaaatggcaggacctgagcgag

SEQ ID NO: 23681 - RNA, 75 nt, synthetic construct
  source 1..75: mol_type = other RNA
gctgaatggggtcccccgactctggctttcccccaggtctacatgttcctggtgaaatggcaggacctgtcggag

SEQ ID NO: 23682 - RNA, 75 nt, synthetic construct
  source 1..75: mol_type = other RNA
gctgaatggggtcccccgactctggctttcccccaggtgtacatgttcctggtgaaatggcaggacctgagcgag

SEQ ID NO: 23683 - RNA, 75 nt, synthetic construct
  source 1..75: mol_type = other RNA
gctgaatggggtcccccgactctggctttcccccaggtctacatgttcctggtgaaatggcaggacctgagcgag

SEQ ID NO: 23684 - RNA, 75 nt, synthetic construct
  source 1..75: mol_type = other RNA
gctgaatggggtcccccgactctggctttcccccaggtatacatgttcctggtgaaatggcaggacctgagtgag

SEQ ID NO: 23685 - RNA, 75 nt, synthetic construct
  source 1..75: mol_type = other RNA
gctgaatggggtcccccgactctggctttcccccaggtatacatgttcctggtgaaatggcaggacctgagcgag

SEQ ID NO: 23686 - RNA, 75 nt, synthetic construct
  source 1..75: mol_type = other RNA
gctgaatggggtcccccgactctggctttcccccaggtgtacatgttcctggtgaaatggcaggacctgtcggag

SEQ ID NO: 23687 - RNA, 75 nt, synthetic construct
  source 1..75: mol_type = other RNA
gctgaatggggtcccccgactctggctttcccccaggtatacatgttcctggtgaaatggcaggacctgtcggag

SEQ ID NO: 23688 - RNA, 75 nt, synthetic construct
  source 1..75: mol_type = other RNA
gctgaatggggtcccccgactctggctttcccccaggtctacatgttcctggtgaaatggcaggacctgagtgag

SEQ ID NO: 23689 - RNA, 75 nt, synthetic construct
  source 1..75: mol_type = other RNA
gctgaatggggtcccccgactctggctttcccccaggtttacatgttcctggtgaaatggcaggacctgagtgag

SEQ ID NO: 23690 - RNA, 76 nt, synthetic construct
  source 1..76: mol_type = other RNA
ggctgaatggggtcccccgactctggctttcccccaggtatacatgttcctggtgaaatggcaggacctgagtgag

SEQ ID NO: 23691 - RNA, 76 nt, synthetic construct
  source 1..76: mol_type = other RNA
ggctgaatggggtcccccgactctggctttcccccaggtttacatgttcctggtgaaatggcaggacctgtcggag

SEQ ID NO: 23692 - RNA, 76 nt, synthetic construct
  source 1..76: mol_type = other RNA
ggctgaatggggtcccccgactctggctttcccccaggtgtacatgttcctggtgaaatggcaggacctgagcgag

SEQ ID NO: 23693 - RNA, 76 nt, synthetic construct
  source 1..76: mol_type = other RNA
ggctgaatggggtcccccgactctggctttcccccaggtttacatgttcctggtgaaatggcaggacctgagtgag

SEQ ID NO: 23694 - RNA, 76 nt, synthetic construct
  source 1..76: mol_type = other RNA
ggctgaatggggtcccccgactctggctttcccccaggtttacatgttcctggtgaaatggcaggacctgagcgag

SEQ ID NO: 23695 - RNA, 76 nt, synthetic construct
  source 1..76: mol_type = other RNA
ggctgaatggggtcccccgactctggctttcccccaggtgtacatgttcctggtgaaatggcaggacctgtcggag

SEQ ID NO: 23696 - RNA, 76 nt, synthetic construct
  source 1..76: mol_type = other RNA
ggctgaatggggtcccccgactctggctttcccccaggtctacatgttcctggtgaaatggcaggacctgagtgag

SEQ ID NO: 23697 - RNA, 76 nt, synthetic construct
  source 1..76: mol_type = other RNA
ggctgaatggggtcccccgactctggctttcccccaggtctacatgttcctggtgaaatggcaggacctgtcggag

SEQ ID NO: 23698 - RNA, 76 nt, synthetic construct
  source 1..76: mol_type = other RNA
ggctgaatggggtcccccgactctggctttcccccaggtatacatgttcctggtgaaatggcaggacctgagcgag

SEQ ID NO: 23699 - RNA, 76 nt, synthetic construct
  source 1..76: mol_type = other RNA
ggctgaatggggtcccccgactctggctttcccccaggtgtacatgttcctggtgaaatggcaggacctgagtgag

SEQ ID NO: 23700 - RNA, 76 nt, synthetic construct
  source 1..76: mol_type = other RNA
ggctgaatggggtcccccgactctggctttcccccaggtctacatgttcctggtgaaatggcaggacctgagcgag

SEQ ID NO: 23701 - RNA, 76 nt, synthetic construct
  source 1..76: mol_type = other RNA
ggctgaatggggtcccccgactctggctttcccccaggtatacatgttcctggtgaaatggcaggacctgtcggag

SEQ ID NO: 23702 - RNA, 77 nt, synthetic construct
  source 1..77: mol_type = other RNA
aggctgaatggggtcccccgactctggctttcccccaggtttacatgttcctggtgaaatggcaggacctgtcggag

SEQ ID NO: 23703 - RNA, 77 nt, synthetic construct
  source 1..77: mol_type = other RNA
aggctgaatggggtcccccgactctggctttcccccaggtgtacatgttcctggtgaaatggcaggacctgagtgag

SEQ ID NO: 23704 - RNA, 77 nt, synthetic construct
  source 1..77: mol_type = other RNA
aggctgaatggggtcccccgactctggctttcccccaggtttacatgttcctggtgaaatggcaggacctgagtgag

SEQ ID NO: 23705 - RNA, 77 nt, synthetic construct
  source 1..77: mol_type = other RNA
aggctgaatggggtcccccgactctggctttcccccaggtttacatgttcctggtgaaatggcaggacctgagcgag

SEQ ID NO: 23706 - RNA, 77 nt, synthetic construct
  source 1..77: mol_type = other RNA
aggctgaatggggtcccccgactctggctttcccccaggtgtacatgttcctggtgaaatggcaggacctgagcgag

SEQ ID NO: 23707 - RNA, 77 nt, synthetic construct
  source 1..77: mol_type = other RNA
aggctgaatggggtcccccgactctggctttcccccaggtgtacatgttcctggtgaaatggcaggacctgtcggag

SEQ ID NO: 23708 - RNA, 77 nt, synthetic construct
  source 1..77: mol_type = other RNA
aggctgaatggggtcccccgactctggctttcccccaggtctacatgttcctggtgaaatggcaggacctgtcggag

SEQ ID NO: 23709 - RNA, 77 nt, synthetic construct
  source 1..77: mol_type = other RNA
aggctgaatggggtcccccgactctggctttcccccaggtatacatgttcctggtgaaatggcaggacctgagcgag

SEQ ID NO: 23710 - RNA, 77 nt, synthetic construct
  source 1..77: mol_type = other RNA
aggctgaatggggtcccccgactctggctttcccccaggtatacatgttcctggtgaaatggcaggacctgagtgag

SEQ ID NO: 23711 - RNA, 77 nt, synthetic construct
  source 1..77: mol_type = other RNA
aggctgaatggggtcccccgactctggctttcccccaggtatacatgttcctggtgaaatggcaggacctgtcggag

SEQ ID NO: 23712 - RNA, 77 nt, synthetic construct
  source 1..77: mol_type = other RNA
aggctgaatggggtcccccgactctggctttcccccaggtctacatgttcctggtgaaatggcaggacctgagcgag

SEQ ID NO: 23713 - RNA, 77 nt, synthetic construct
  source 1..77: mol_type = other RNA
aggctgaatggggtcccccgactctggctttcccccaggtctacatgttcctggtgaaatggcaggacctgagtgag

SEQ ID NO: 23714 - RNA, 78 nt, synthetic construct
  source 1..78: mol_type = other RNA
gaggctgaatggggtcccccgactctggctttcccccaggtttacatgttcctggtgaaatggcaggacctgagtgag

SEQ ID NO: 23715 - RNA, 78 nt, synthetic construct
  source 1..78: mol_type = other RNA
gaggctgaatggggtcccccgactctggctttcccccaggtttacatgttcctggtgaaatggcaggacctgtcggag

SEQ ID NO: 23716 - RNA, 78 nt, synthetic construct
  source 1..78: mol_type = other RNA
gaggctgaatggggtcccccgactctggctttcccccaggtttacatgttcctggtgaaatggcaggacctgagcgag

SEQ ID NO: 23717 - RNA, 78 nt, synthetic construct
  source 1..78: mol_type = other RNA
gaggctgaatggggtcccccgactctggctttcccccaggtgtacatgttcctggtgaaatggcaggacctgtcggag

SEQ ID NO: 23718 - RNA, 78 nt, synthetic construct
  source 1..78: mol_type = other RNA
gaggctgaatggggtcccccgactctggctttcccccaggtatacatgttcctggtgaaatggcaggacctgagtgag

SEQ ID NO: 23719 - RNA, 78 nt, synthetic construct
  source 1..78: mol_type = other RNA
gaggctgaatggggtcccccgactctggctttcccccaggtctacatgttcctggtgaaatggcaggacctgagtgag

SEQ ID NO: 23720 - RNA, 78 nt, synthetic construct
  source 1..78: mol_type = other RNA
gaggctgaatggggtcccccgactctggctttcccccaggtatacatgttcctggtgaaatggcaggacctgagcgag

SEQ ID NO: 23721 - RNA, 78 nt, synthetic construct
  source 1..78: mol_type = other RNA
gaggctgaatggggtcccccgactctggctttcccccaggtatacatgttcctggtgaaatggcaggacctgtcggag

SEQ ID NO: 23722 - RNA, 78 nt, synthetic construct
  source 1..78: mol_type = other RNA
gaggctgaatggggtcccccgactctggctttcccccaggtgtacatgttcctggtgaaatggcaggacctgagtgag

SEQ ID NO: 23723 - RNA, 78 nt, synthetic construct
  source 1..78: mol_type = other RNA
gaggctgaatggggtcccccgactctggctttcccccaggtgtacatgttcctggtgaaatggcaggacctgagcgag

SEQ ID NO: 23724 - RNA, 78 nt, synthetic construct
  source 1..78: mol_type = other RNA
gaggctgaatggggtcccccgactctggctttcccccaggtctacatgttcctggtgaaatggcaggacctgtcggag

SEQ ID NO: 23725 - RNA, 78 nt, synthetic construct
  source 1..78: mol_type = other RNA
gaggctgaatggggtcccccgactctggctttcccccaggtctacatgttcctggtgaaatggcaggacctgagcgag

SEQ ID NO: 23726 - RNA, 79 nt, synthetic construct
  source 1..79: mol_type = other RNA
ggaggctgaatggggtcccccgactctggctttcccccaggtctacatgttcctggtgaaatggcaggacctgagtgag

SEQ ID NO: 23727 - RNA, 79 nt, synthetic construct
  source 1..79: mol_type = other RNA
ggaggctgaatggggtcccccgactctggctttcccccaggtctacatgttcctggtgaaatggcaggacctgagcgag

SEQ ID NO: 23728 - RNA, 79 nt, synthetic construct
  source 1..79: mol_type = other RNA
ggaggctgaatggggtcccccgactctggctttcccccaggtatacatgttcctggtgaaatggcaggacctgagtgag

SEQ ID NO: 23729 - RNA, 79 nt, synthetic construct
  source 1..79: mol_type = other RNA
ggaggctgaatggggtcccccgactctggctttcccccaggtatacatgttcctggtgaaatggcaggacctgagcgag

SEQ ID NO: 23730 - RNA, 79 nt, synthetic construct
  source 1..79: mol_type = other RNA
ggaggctgaatggggtcccccgactctggctttcccccaggtctacatgttcctggtgaaatggcaggacctgtcggag

SEQ ID NO: 23731 - RNA, 79 nt, synthetic construct
  source 1..79: mol_type = other RNA
ggaggctgaatggggtcccccgactctggctttcccccaggtgtacatgttcctggtgaaatggcaggacctgagcgag

SEQ ID NO: 23732 - RNA, 79 nt, synthetic construct
  source 1..79: mol_type = other RNA
ggaggctgaatggggtcccccgactctggctttcccccaggtttacatgttcctggtgaaatggcaggacctgtcggag

SEQ ID NO: 23733 - RNA, 79 nt, synthetic construct
  source 1..79: mol_type = other RNA
ggaggctgaatggggtcccccgactctggctttcccccaggtgtacatgttcctggtgaaatggcaggacctgtcggag

SEQ ID NO: 23734 - RNA, 79 nt, synthetic construct
  source 1..79: mol_type = other RNA
ggaggctgaatggggtcccccgactctggctttcccccaggtttacatgttcctggtgaaatggcaggacctgagcgag

SEQ ID NO: 23735 - RNA, 79 nt, synthetic construct
  source 1..79: mol_type = other RNA
ggaggctgaatggggtcccccgactctggctttcccccaggtttacatgttcctggtgaaatggcaggacctgagtgag

SEQ ID NO: 23736 - RNA, 79 nt, synthetic construct
  source 1..79: mol_type = other RNA
ggaggctgaatggggtcccccgactctggctttcccccaggtatacatgttcctggtgaaatggcaggacctgtcggag

SEQ ID NO: 23737 - RNA, 79 nt, synthetic construct
  source 1..79: mol_type = other RNA
ggaggctgaatggggtcccccgactctggctttcccccaggtgtacatgttcctggtgaaatggcaggacctgagtgag

SEQ ID NO: 23738 - RNA, 80 nt, synthetic construct
  source 1..80: mol_type = other RNA
tggaggctgaatggggtcccccgactctggctttcccccaggtttacatgttcctggtgaaatggcaggacctgagtgag

SEQ ID NO: 23739 - RNA, 80 nt, synthetic construct
  source 1..80: mol_type = other RNA
tggaggctgaatggggtcccccgactctggctttcccccaggtttacatgttcctggtgaaatggcaggacctgagcgag

SEQ ID NO: 23740 - RNA, 80 nt, synthetic construct
  source 1..80: mol_type = other RNA
tggaggctgaatggggtcccccgactctggctttcccccaggtctacatgttcctggtgaaatggcaggacctgagtgag

SEQ ID NO: 23741 - RNA, 80 nt, synthetic construct
  source 1..80: mol_type = other RNA
tggaggctgaatggggtcccccgactctggctttcccccaggtgtacatgttcctggtgaaatggcaggacctgagcgag

SEQ ID NO: 23742 - RNA, 80 nt, synthetic construct
  source 1..80: mol_type = other RNA
tggaggctgaatggggtcccccgactctggctttcccccaggtctacatgttcctggtgaaatggcaggacctgtcggag

SEQ ID NO: 23743 - RNA, 80 nt, synthetic construct
  source 1..80: mol_type = other RNA
tggaggctgaatggggtcccccgactctggctttcccccaggtctacatgttcctggtgaaatggcaggacctgagcgag

SEQ ID NO: 23744 - RNA, 80 nt, synthetic construct
  source 1..80: mol_type = other RNA
tggaggctgaatggggtcccccgactctggctttcccccaggtatacatgttcctggtgaaatggcaggacctgtcggag

SEQ ID NO: 23745 - RNA, 80 nt, synthetic construct
  source 1..80: mol_type = other RNA
tggaggctgaatggggtcccccgactctggctttcccccaggtttacatgttcctggtgaaatggcaggacctgtcggag

SEQ ID NO: 23746 - RNA, 80 nt, synthetic construct
  source 1..80: mol_type = other RNA
tggaggctgaatggggtcccccgactctggctttcccccaggtgtacatgttcctggtgaaatggcaggacctgagtgag

SEQ ID NO: 23747 - RNA, 80 nt, synthetic construct
  source 1..80: mol_type = other RNA
tggaggctgaatggggtcccccgactctggctttcccccaggtatacatgttcctggtgaaatggcaggacctgagcgag

SEQ ID NO: 23748 - RNA, 80 nt, synthetic construct
  source 1..80: mol_type = other RNA
tggaggctgaatggggtcccccgactctggctttcccccaggtatacatgttcctggtgaaatggcaggacctgagtgag

SEQ ID NO: 23749 - RNA, 80 nt, synthetic construct
  source 1..80: mol_type = other RNA
tggaggctgaatggggtcccccgactctggctttcccccaggtgtacatgttcctggtgaaatggcaggacctgtcggag

SEQ ID NO: 23750 - RNA, 81 nt, synthetic construct
  source 1..81: mol_type = other RNA
ttggaggctgaatggggtcccccgactctggctttcccccaggtctacatgttcctggtgaaatggcaggacctgagtgag

SEQ ID NO: 23751 - RNA, 81 nt, synthetic construct
  source 1..81: mol_type = other RNA
ttggaggctgaatggggtcccccgactctggctttcccccaggtttacatgttcctggtgaaatggcaggacctgagtgag

SEQ ID NO: 23752 - RNA, 81 nt, synthetic construct
  source 1..81: mol_type = other RNA
ttggaggctgaatggggtcccccgactctggctttcccccaggtttacatgttcctggtgaaatggcaggacctgagcgag

SEQ ID NO: 23753 - RNA, 81 nt, synthetic construct
  source 1..81: mol_type = other RNA
ttggaggctgaatggggtcccccgactctggctttcccccaggtttacatgttcctggtgaaatggcaggacctgtcggag

SEQ ID NO: 23754 - RNA, 81 nt, synthetic construct
  source 1..81: mol_type = other RNA
ttggaggctgaatggggtcccccgactctggctttcccccaggtgtacatgttcctggtgaaatggcaggacctgtcggag

SEQ ID NO: 23755 - RNA, 81 nt, synthetic construct
  source 1..81: mol_type = other RNA
ttggaggctgaatggggtcccccgactctggctttcccccaggtgtacatgttcctggtgaaatggcaggacctgagtgag

SEQ ID NO: 23756 - RNA, 81 nt, synthetic construct
  source 1..81: mol_type = other RNA
ttggaggctgaatggggtcccccgactctggctttcccccaggtatacatgttcctggtgaaatggcaggacctgagcgag

SEQ ID NO: 23757 - RNA, 81 nt, synthetic construct
  source 1..81: mol_type = other RNA
ttggaggctgaatggggtcccccgactctggctttcccccaggtctacatgttcctggtgaaatggcaggacctgtcggag

SEQ ID NO: 23758 - RNA, 81 nt, synthetic construct
  source 1..81: mol_type = other RNA
ttggaggctgaatggggtcccccgactctggctttcccccaggtctacatgttcctggtgaaatggcaggacctgagcgag

SEQ ID NO: 23759 - RNA, 81 nt, synthetic construct
  source 1..81: mol_type = other RNA
ttggaggctgaatggggtcccccgactctggctttcccccaggtatacatgttcctggtgaaatggcaggacctgtcggag

SEQ ID NO: 23760 - RNA, 81 nt, synthetic construct
  source 1..81: mol_type = other RNA
ttggaggctgaatggggtcccccgactctggctttcccccaggtatacatgttcctggtgaaatggcaggacctgagtgag

SEQ ID NO: 23761 - RNA, 81 nt, synthetic construct
  source 1..81: mol_type = other RNA
ttggaggctgaatggggtcccccgactctggctttcccccaggtgtacatgttcctggtgaaatggcaggacctgagcgag

SEQ ID NO: 23762 - RNA, 82 nt, synthetic construct
  source 1..82: mol_type = other RNA
tttggaggctgaatggggtcccccgactctggctttcccccaggtatacatgttcctggtgaaatggcaggacctgagcgag

SEQ ID NO: 23763 - RNA, 82 nt, synthetic construct
  source 1..82: mol_type = other RNA
tttggaggctgaatggggtcccccgactctggctttcccccaggtctacatgttcctggtgaaatggcaggacctgagtgag

SEQ ID NO: 23764 - RNA, 82 nt, synthetic construct
  source 1..82: mol_type = other RNA
tttggaggctgaatggggtcccccgactctggctttcccccaggtctacatgttcctggtgaaatggcaggacctgagcgag

SEQ ID NO: 23765 - RNA, 82 nt, synthetic construct
  source 1..82: mol_type = other RNA
tttggaggctgaatggggtcccccgactctggctttcccccaggtttacatgttcctggtgaaatggcaggacctgtcggag

SEQ ID NO: 23766 - RNA, 82 nt, synthetic construct
  source 1..82: mol_type = other RNA
tttggaggctgaatggggtcccccgactctggctttcccccaggtttacatgttcctggtgaaatggcaggacctgagtgag

SEQ ID NO: 23767 - RNA, 82 nt, synthetic construct
  source 1..82: mol_type = other RNA
tttggaggctgaatggggtcccccgactctggctttcccccaggtttacatgttcctggtgaaatggcaggacctgagcgag

SEQ ID NO: 23768 - RNA, 82 nt, synthetic construct
  source 1..82: mol_type = other RNA
tttggaggctgaatggggtcccccgactctggctttcccccaggtgtacatgttcctggtgaaatggcaggacctgagcgag

SEQ ID NO: 23769 - RNA, 82 nt, synthetic construct
  source 1..82: mol_type = other RNA
tttggaggctgaatggggtcccccgactctggctttcccccaggtgtacatgttcctggtgaaatggcaggacctgagtgag

SEQ ID NO: 23770 - RNA, 82 nt, synthetic construct
  source 1..82: mol_type = other RNA
tttggaggctgaatggggtcccccgactctggctttcccccaggtatacatgttcctggtgaaatggcaggacctgagtgag

SEQ ID NO: 23771 - RNA, 82 nt, synthetic construct
  source 1..82: mol_type = other RNA
tttggaggctgaatggggtcccccgactctggctttcccccaggtctacatgttcctggtgaaatggcaggacctgtcggag

SEQ ID NO: 23772 - RNA, 82 nt, synthetic construct
  source 1..82: mol_type = other RNA
tttggaggctgaatggggtcccccgactctggctttcccccaggtgtacatgttcctggtgaaatggcaggacctgtcggag

SEQ ID NO: 23773 - RNA, 82 nt, synthetic construct
  source 1..82: mol_type = other RNA
tttggaggctgaatggggtcccccgactctggctttcccccaggtatacatgttcctggtgaaatggcaggacctgtcggag

SEQ ID NO: 23774 - RNA, 83 nt, synthetic construct
  source 1..83: mol_type = other RNA
ctttggaggctgaatggggtcccccgactctggctttcccccaggtgtacatgttcctggtgaaatggcaggacctgagtgag

SEQ ID NO: 23775 - RNA, 83 nt, synthetic construct
  source 1..83: mol_type = other RNA
ctttggaggctgaatggggtcccccgactctggctttcccccaggtgtacatgttcctggtgaaatggcaggacctgagcgag

SEQ ID NO: 23776 - RNA, 83 nt, synthetic construct
  source 1..83: mol_type = other RNA
ctttggaggctgaatggggtcccccgactctggctttcccccaggtatacatgttcctggtgaaatggcaggacctgtcggag

SEQ ID NO: 23777 - RNA, 83 nt, synthetic construct
  source 1..83: mol_type = other RNA
ctttggaggctgaatggggtcccccgactctggctttcccccaggtatacatgttcctggtgaaatggcaggacctgagcgag

SEQ ID NO: 23778 - RNA, 83 nt, synthetic construct
  source 1..83: mol_type = other RNA
ctttggaggctgaatggggtcccccgactctggctttcccccaggtctacatgttcctggtgaaatggcaggacctgtcggag

SEQ ID NO: 23779 - RNA, 83 nt, synthetic construct
  source 1..83: mol_type = other RNA
ctttggaggctgaatggggtcccccgactctggctttcccccaggtctacatgttcctggtgaaatggcaggacctgagcgag

SEQ ID NO: 23780 - RNA, 83 nt, synthetic construct
  source 1..83: mol_type = other RNA
ctttggaggctgaatggggtcccccgactctggctttcccccaggtctacatgttcctggtgaaatggcaggacctgagtgag

SEQ ID NO: 23781 - RNA, 83 nt, synthetic construct
  source 1..83: mol_type = other RNA
ctttggaggctgaatggggtcccccgactctggctttcccccaggtgtacatgttcctggtgaaatggcaggacctgtcggag

SEQ ID NO: 23782 - RNA, 83 nt, synthetic construct
  source 1..83: mol_type = other RNA
ctttggaggctgaatggggtcccccgactctggctttcccccaggtttacatgttcctggtgaaatggcaggacctgagcgag

SEQ ID NO: 23783 - RNA, 83 nt, synthetic construct
  source 1..83: mol_type = other RNA
ctttggaggctgaatggggtcccccgactctggctttcccccaggtttacatgttcctggtgaaatggcaggacctgagtgag

SEQ ID NO: 23784 - RNA, 83 nt, synthetic construct
  source 1..83: mol_type = other RNA
ctttggaggctgaatggggtcccccgactctggctttcccccaggtttacatgttcctggtgaaatggcaggacctgtcggag

SEQ ID NO: 23785 - RNA, 83 nt, synthetic construct
  source 1..83: mol_type = other RNA
ctttggaggctgaatggggtcccccgactctggctttcccccaggtatacatgttcctggtgaaatggcaggacctgagtgag

SEQ ID NO: 23786 - RNA, 84 nt, synthetic construct
  source 1..84: mol_type = other RNA
tctttggaggctgaatggggtcccccgactctggctttcccccaggtttacatgttcctggtgaaatggcaggacctgagcgag

SEQ ID NO: 23787 - RNA, 84 nt, synthetic construct
  source 1..84: mol_type = other RNA
tctttggaggctgaatggggtcccccgactctggctttcccccaggtctacatgttcctggtgaaatggcaggacctgagcgag

SEQ ID NO: 23788 - RNA, 84 nt, synthetic construct
  source 1..84: mol_type = other RNA
tctttggaggctgaatggggtcccccgactctggctttcccccaggtatacatgttcctggtgaaatggcaggacctgagtgag

SEQ ID NO: 23789 - RNA, 84 nt, synthetic construct
  source 1..84: mol_type = other RNA
tctttggaggctgaatggggtcccccgactctggctttcccccaggtatacatgttcctggtgaaatggcaggacctgtcggag

SEQ ID NO: 23790 - RNA, 84 nt, synthetic construct
  source 1..84: mol_type = other RNA
tctttggaggctgaatggggtcccccgactctggctttcccccaggtctacatgttcctggtgaaatggcaggacctgagtgag

SEQ ID NO: 23791 - RNA, 84 nt, synthetic construct
  source 1..84: mol_type = other RNA
tctttggaggctgaatggggtcccccgactctggctttcccccaggtatacatgttcctggtgaaatggcaggacctgagcgag

SEQ ID NO: 23792 - RNA, 84 nt, synthetic construct
  source 1..84: mol_type = other RNA
tctttggaggctgaatggggtcccccgactctggctttcccccaggtgtacatgttcctggtgaaatggcaggacctgagcgag

SEQ ID NO: 23793 - RNA, 84 nt, synthetic construct
  source 1..84: mol_type = other RNA
tctttggaggctgaatggggtcccccgactctggctttcccccaggtctacatgttcctggtgaaatggcaggacctgtcggag

SEQ ID NO: 23794 - RNA, 84 nt, synthetic construct
  source 1..84: mol_type = other RNA
tctttggaggctgaatggggtcccccgactctggctttcccccaggtttacatgttcctggtgaaatggcaggacctgagtgag

SEQ ID NO: 23795 - RNA, 84 nt, synthetic construct
  source 1..84: mol_type = other RNA
tctttggaggctgaatggggtcccccgactctggctttcccccaggtttacatgttcctggtgaaatggcaggacctgtcggag

SEQ ID NO: 23796 - RNA, 84 nt, synthetic construct
  source 1..84: mol_type = other RNA
tctttggaggctgaatggggtcccccgactctggctttcccccaggtgtacatgttcctggtgaaatggcaggacctgtcggag

SEQ ID NO: 23797 - RNA, 84 nt, synthetic construct
  source 1..84: mol_type = other RNA
tctttggaggctgaatggggtcccccgactctggctttcccccaggtgtacatgttcctggtgaaatggcaggacctgagtgag

SEQ ID NO: 23798 - RNA, 85 nt, synthetic construct
  source 1..85: mol_type = other RNA
ctctttggaggctgaatggggtcccccgactctggctttcccccaggtttacatgttcctggtgaaatggcaggacctgagcgag

SEQ ID NO: 23799 - RNA, 85 nt, synthetic construct
  source 1..85: mol_type = other RNA
ctctttggaggctgaatggggtcccccgactctggctttcccccaggtctacatgttcctggtgaaatggcaggacctgagtgag

SEQ ID NO: 23800 - RNA, 85 nt, synthetic construct
  source 1..85: mol_type = other RNA
ctctttggaggctgaatggggtcccccgactctggctttcccccaggtttacatgttcctggtgaaatggcaggacctgtcggag

SEQ ID NO: 23801 - RNA, 85 nt, synthetic construct
  source 1..85: mol_type = other RNA
ctctttggaggctgaatggggtcccccgactctggctttcccccaggtgtacatgttcctggtgaaatggcaggacctgtcggag

SEQ ID NO: 23802 - RNA, 85 nt, synthetic construct
  source 1..85: mol_type = other RNA
ctctttggaggctgaatggggtcccccgactctggctttcccccaggtgtacatgttcctggtgaaatggcaggacctgagcgag

SEQ ID NO: 23803 - RNA, 85 nt, synthetic construct
  source 1..85: mol_type = other RNA
ctctttggaggctgaatggggtcccccgactctggctttcccccaggtgtacatgttcctggtgaaatggcaggacctgagtgag

SEQ ID NO: 23804 - RNA, 85 nt, synthetic construct
  source 1..85: mol_type = other RNA
ctctttggaggctgaatggggtcccccgactctggctttcccccaggtttacatgttcctggtgaaatggcaggacctgagtgag

SEQ ID NO: 23805 - RNA, 85 nt, synthetic construct
  source 1..85: mol_type = other RNA
ctctttggaggctgaatggggtcccccgactctggctttcccccaggtatacatgttcctggtgaaatggcaggacctgtcggag

SEQ ID NO: 23806 - RNA, 85 nt, synthetic construct
  source 1..85: mol_type = other RNA
ctctttggaggctgaatggggtcccccgactctggctttcccccaggtctacatgttcctggtgaaatggcaggacctgagcgag

SEQ ID NO: 23807 - RNA, 85 nt, synthetic construct
  source 1..85: mol_type = other RNA
ctctttggaggctgaatggggtcccccgactctggctttcccccaggtatacatgttcctggtgaaatggcaggacctgagtgag

SEQ ID NO: 23808 - RNA, 85 nt, synthetic construct
  source 1..85: mol_type = other RNA
ctctttggaggctgaatggggtcccccgactctggctttcccccaggtatacatgttcctggtgaaatggcaggacctgagcgag

SEQ ID NO: 23809 - RNA, 85 nt, synthetic construct
  source 1..85: mol_type = other RNA
ctctttggaggctgaatggggtcccccgactctggctttcccccaggtctacatgttcctggtgaaatggcaggacctgtcggag

SEQ ID NO: 23810 - RNA, 86 nt, synthetic construct
  source 1..86: mol_type = other RNA
cctctttggaggctgaatggggtcccccgactctggctttcccccaggtttacatgttcctggtgaaatggcaggacctgtcggag

SEQ ID NO: 23811 - RNA, 86 nt, synthetic construct
  source 1..86: mol_type = other RNA
cctctttggaggctgaatggggtcccccgactctggctttcccccaggtttacatgttcctggtgaaatggcaggacctgagtgag

SEQ ID NO: 23812 - RNA, 86 nt, synthetic construct
  source 1..86: mol_type = other RNA
cctctttggaggctgaatggggtcccccgactctggctttcccccaggtttacatgttcctggtgaaatggcaggacctgagcgag

SEQ ID NO: 23813 - RNA, 86 nt, synthetic construct
  source 1..86: mol_type = other RNA
cctctttggaggctgaatggggtcccccgactctggctttcccccaggtgtacatgttcctggtgaaatggcaggacctgagtgag

SEQ ID NO: 23814 - RNA, 86 nt, synthetic construct
  source 1..86: mol_type = other RNA
cctctttggaggctgaatggggtcccccgactctggctttcccccaggtctacatgttcctggtgaaatggcaggacctgtcggag

SEQ ID NO: 23815 - RNA, 86 nt, synthetic construct
  source 1..86: mol_type = other RNA
cctctttggaggctgaatggggtcccccgactctggctttcccccaggtatacatgttcctggtgaaatggcaggacctgagcgag

SEQ ID NO: 23816 - RNA, 86 nt, synthetic construct
  source 1..86: mol_type = other RNA
cctctttggaggctgaatggggtcccccgactctggctttcccccaggtatacatgttcctggtgaaatggcaggacctgtcggag

SEQ ID NO: 23817 - RNA, 86 nt, synthetic construct
  source 1..86: mol_type = other RNA
cctctttggaggctgaatggggtcccccgactctggctttcccccaggtatacatgttcctggtgaaatggcaggacctgagtgag

SEQ ID NO: 23818 - RNA, 86 nt, synthetic construct
  source 1..86: mol_type = other RNA
cctctttggaggctgaatggggtcccccgactctggctttcccccaggtgtacatgttcctggtgaaatggcaggacctgagcgag

SEQ ID NO: 23819 - RNA, 86 nt, synthetic construct
  source 1..86: mol_type = other RNA
cctctttggaggctgaatggggtcccccgactctggctttcccccaggtgtacatgttcctggtgaaatggcaggacctgtcggag

SEQ ID NO: 23820 - RNA, 86 nt, synthetic construct
  source 1..86: mol_type = other RNA
cctctttggaggctgaatggggtcccccgactctggctttcccccaggtctacatgttcctggtgaaatggcaggacctgagcgag

SEQ ID NO: 23821 - RNA, 86 nt, synthetic construct
  source 1..86: mol_type = other RNA
cctctttggaggctgaatggggtcccccgactctggctttcccccaggtctacatgttcctggtgaaatggcaggacctgagtgag

SEQ ID NO: 23822 - RNA, 87 nt, synthetic construct
  source 1..87: mol_type = other RNA
gcctctttggaggctgaatggggtcccccgactctggctttcccccaggtctacatgttcctggtgaaatggcaggacctgagcgag

SEQ ID NO: 23823 - RNA, 87 nt, synthetic construct
  source 1..87: mol_type = other RNA
gcctctttggaggctgaatggggtcccccgactctggctttcccccaggtgtacatgttcctggtgaaatggcaggacctgtcggag

SEQ ID NO: 23824 - RNA, 87 nt, synthetic construct
  source 1..87: mol_type = other RNA
gcctctttggaggctgaatggggtcccccgactctggctttcccccaggtgtacatgttcctggtgaaatggcaggacctgagtgag

SEQ ID NO: 23825 - RNA, 87 nt, synthetic construct
  source 1..87: mol_type = other RNA
gcctctttggaggctgaatggggtcccccgactctggctttcccccaggtctacatgttcctggtgaaatggcaggacctgtcggag

SEQ ID NO: 23826 - RNA, 87 nt, synthetic construct
  source 1..87: mol_type = other RNA
gcctctttggaggctgaatggggtcccccgactctggctttcccccaggtctacatgttcctggtgaaatggcaggacctgagtgag

SEQ ID NO: 23827 - RNA, 87 nt, synthetic construct
  source 1..87: mol_type = other RNA
gcctctttggaggctgaatggggtcccccgactctggctttcccccaggtatacatgttcctggtgaaatggcaggacctgagtgag

SEQ ID NO: 23828 - RNA, 87 nt, synthetic construct
  source 1..87: mol_type = other RNA
gcctctttggaggctgaatggggtcccccgactctggctttcccccaggtatacatgttcctggtgaaatggcaggacctgagcgag

SEQ ID NO: 23829 - RNA, 87 nt, synthetic construct
  source 1..87: mol_type = other RNA
gcctctttggaggctgaatggggtcccccgactctggctttcccccaggtgtacatgttcctggtgaaatggcaggacctgagcgag

SEQ ID NO: 23830 - RNA, 87 nt, synthetic construct
  source 1..87: mol_type = other RNA
gcctctttggaggctgaatggggtcccccgactctggctttcccccaggtttacatgttcctggtgaaatggcaggacctgagcgag

SEQ ID NO: 23831 - RNA, 87 nt, synthetic construct
  source 1..87: mol_type = other RNA
gcctctttggaggctgaatggggtcccccgactctggctttcccccaggtttacatgttcctggtgaaatggcaggacctgtcggag

SEQ ID NO: 23832 - RNA, 87 nt, synthetic construct
  source 1..87: mol_type = other RNA
gcctctttggaggctgaatggggtcccccgactctggctttcccccaggtatacatgttcctggtgaaatggcaggacctgtcggag

SEQ ID NO: 23833 - RNA, 87 nt, synthetic construct
  source 1..87: mol_type = other RNA
gcctctttggaggctgaatggggtcccccgactctggctttcccccaggtttacatgttcctggtgaaatggcaggacctgagtgag

SEQ ID NO: 23834 - RNA, 88 nt, synthetic construct
  source 1..88: mol_type = other RNA
agcctctttggaggctgaatggggtcccccgactctggctttcccccaggtatacatgttcctggtgaaatggcaggacctgagcgag

SEQ ID NO: 23835 - RNA, 88 nt, synthetic construct
  source 1..88: mol_type = other RNA
agcctctttggaggctgaatggggtcccccgactctggctttcccccaggtttacatgttcctggtgaaatggcaggacctgtcggag

SEQ ID NO: 23836 - RNA, 88 nt, synthetic construct
  source 1..88: mol_type = other RNA
agcctctttggaggctgaatggggtcccccgactctggctttcccccaggtgtacatgttcctggtgaaatggcaggacctgagtgag

SEQ ID NO: 23837 - RNA, 88 nt, synthetic construct
  source 1..88: mol_type = other RNA
agcctctttggaggctgaatggggtcccccgactctggctttcccccaggtctacatgttcctggtgaaatggcaggacctgagtgag

SEQ ID NO: 23838 - RNA, 88 nt, synthetic construct
  source 1..88: mol_type = other RNA
agcctctttggaggctgaatggggtcccccgactctggctttcccccaggtatacatgttcctggtgaaatggcaggacctgagtgag

SEQ ID NO: 23839 - RNA, 88 nt, synthetic construct
  source 1..88: mol_type = other RNA
agcctctttggaggctgaatggggtcccccgactctggctttcccccaggtctacatgttcctggtgaaatggcaggacctgtcggag

SEQ ID NO: 23840 - RNA, 88 nt, synthetic construct
  source 1..88: mol_type = other RNA
agcctctttggaggctgaatggggtcccccgactctggctttcccccaggtatacatgttcctggtgaaatggcaggacctgtcggag

SEQ ID NO: 23841 - RNA, 88 nt, synthetic construct
  source 1..88: mol_type = other RNA
agcctctttggaggctgaatggggtcccccgactctggctttcccccaggtttacatgttcctggtgaaatggcaggacctgagcgag

SEQ ID NO: 23842 - RNA, 88 nt, synthetic construct
  source 1..88: mol_type = other RNA
agcctctttggaggctgaatggggtcccccgactctggctttcccccaggtctacatgttcctggtgaaatggcaggacctgagcgag

SEQ ID NO: 23843 - RNA, 88 nt, synthetic construct
  source 1..88: mol_type = other RNA
agcctctttggaggctgaatggggtcccccgactctggctttcccccaggtttacatgttcctggtgaaatggcaggacctgagtgag

SEQ ID NO: 23844 - RNA, 88 nt, synthetic construct
  source 1..88: mol_type = other RNA
agcctctttggaggctgaatggggtcccccgactctggctttcccccaggtgtacatgttcctggtgaaatggcaggacctgtcggag

SEQ ID NO: 23845 - RNA, 88 nt, synthetic construct
  source 1..88: mol_type = other RNA
agcctctttggaggctgaatggggtcccccgactctggctttcccccaggtgtacatgttcctggtgaaatggcaggacctgagcgag

SEQ ID NO: 23846 - RNA, 89 nt, synthetic construct
  source 1..89: mol_type = other RNA
aagcctctttggaggctgaatggggtcccccgactctggctttcccccaggtttacatgttcctggtgaaatggcaggacctgagcgag

SEQ ID NO: 23847 - RNA, 89 nt, synthetic construct
  source 1..89: mol_type = other RNA
aagcctctttggaggctgaatggggtcccccgactctggctttcccccaggtttacatgttcctggtgaaatggcaggacctgtcggag

SEQ ID NO: 23848 - RNA, 89 nt, synthetic construct
  source 1..89: mol_type = other RNA
aagcctctttggaggctgaatggggtcccccgactctggctttcccccaggtatacatgttcctggtgaaatggcaggacctgagtgag

SEQ ID NO: 23849 - RNA, 89 nt, synthetic construct
  source 1..89: mol_type = other RNA
aagcctctttggaggctgaatggggtcccccgactctggctttcccccaggtatacatgttcctggtgaaatggcaggacctgtcggag

SEQ ID NO: 23850 - RNA, 89 nt, synthetic construct
  source 1..89: mol_type = other RNA
aagcctctttggaggctgaatggggtcccccgactctggctttcccccaggtctacatgttcctggtgaaatggcaggacctgagcgag

SEQ ID NO: 23851 - RNA, 89 nt, synthetic construct
  source 1..89: mol_type = other RNA
aagcctctttggaggctgaatggggtcccccgactctggctttcccccaggtctacatgttcctggtgaaatggcaggacctgagtgag

SEQ ID NO: 23852 - RNA, 89 nt, synthetic construct
  source 1..89: mol_type = other RNA
aagcctctttggaggctgaatggggtcccccgactctggctttcccccaggtgtacatgttcctggtgaaatggcaggacctgagcgag

SEQ ID NO: 23853 - RNA, 89 nt, synthetic construct
  source 1..89: mol_type = other RNA
aagcctctttggaggctgaatggggtcccccgactctggctttcccccaggtttacatgttcctggtgaaatggcaggacctgagtgag

SEQ ID NO: 23854 - RNA, 89 nt, synthetic construct
  source 1..89: mol_type = other RNA
aagcctctttggaggctgaatggggtcccccgactctggctttcccccaggtctacatgttcctggtgaaatggcaggacctgtcggag

SEQ ID NO: 23855 - RNA, 89 nt, synthetic construct
  source 1..89: mol_type = other RNA
aagcctctttggaggctgaatggggtcccccgactctggctttcccccaggtgtacatgttcctggtgaaatggcaggacctgtcggag

SEQ ID NO: 23856 - RNA, 89 nt, synthetic construct
  source 1..89: mol_type = other RNA
aagcctctttggaggctgaatggggtcccccgactctggctttcccccaggtatacatgttcctggtgaaatggcaggacctgagcgag

SEQ ID NO: 23857 - RNA, 89 nt, synthetic construct
  source 1..89: mol_type = other RNA
aagcctctttggaggctgaatggggtcccccgactctggctttcccccaggtgtacatgttcctggtgaaatggcaggacctgagtgag

SEQ ID NO: 23858 - RNA, 90 nt, synthetic construct
  source 1..90: mol_type = other RNA
aaagcctctttggaggctgaatggggtcccccgactctggctttcccccaggtttacatgttcctggtgaaatggcaggacctgtcggag

SEQ ID NO: 23859 - RNA, 90 nt, synthetic construct
  source 1..90: mol_type = other RNA
aaagcctctttggaggctgaatggggtcccccgactctggctttcccccaggtttacatgttcctggtgaaatggcaggacctgagtgag

SEQ ID NO: 23860 - RNA, 90 nt, synthetic construct
  source 1..90: mol_type = other RNA
aaagcctctttggaggctgaatggggtcccccgactctggctttcccccaggtatacatgttcctggtgaaatggcaggacctgagtgag

SEQ ID NO: 23861 - RNA, 90 nt, synthetic construct
  source 1..90: mol_type = other RNA
aaagcctctttggaggctgaatggggtcccccgactctggctttcccccaggtttacatgttcctggtgaaatggcaggacctgagcgag

SEQ ID NO: 23862 - RNA, 90 nt, synthetic construct
  source 1..90: mol_type = other RNA
aaagcctctttggaggctgaatggggtcccccgactctggctttcccccaggtgtacatgttcctggtgaaatggcaggacctgtcggag

SEQ ID NO: 23863 - RNA, 90 nt, synthetic construct
  source 1..90: mol_type = other RNA
aaagcctctttggaggctgaatggggtcccccgactctggctttcccccaggtatacatgttcctggtgaaatggcaggacctgagcgag

SEQ ID NO: 23864 - RNA, 90 nt, synthetic construct
  source 1..90: mol_type = other RNA
aaagcctctttggaggctgaatggggtcccccgactctggctttcccccaggtgtacatgttcctggtgaaatggcaggacctgagcgag

SEQ ID NO: 23865 - RNA, 90 nt, synthetic construct
  source 1..90: mol_type = other RNA
aaagcctctttggaggctgaatggggtcccccgactctggctttcccccaggtctacatgttcctggtgaaatggcaggacctgtcggag

SEQ ID NO: 23866 - RNA, 90 nt, synthetic construct
  source 1..90: mol_type = other RNA
aaagcctctttggaggctgaatggggtcccccgactctggctttcccccaggtctacatgttcctggtgaaatggcaggacctgagtgag

SEQ ID NO: 23867 - RNA, 90 nt, synthetic construct
  source 1..90: mol_type = other RNA
aaagcctctttggaggctgaatggggtcccccgactctggctttcccccaggtctacatgttcctggtgaaatggcaggacctgagcgag

SEQ ID NO: 23868 - RNA, 90 nt, synthetic construct
  source 1..90: mol_type = other RNA
aaagcctctttggaggctgaatggggtcccccgactctggctttcccccaggtatacatgttcctggtgaaatggcaggacctgtcggag

SEQ ID NO: 23869 - RNA, 90 nt, synthetic construct
  source 1..90: mol_type = other RNA
aaagcctctttggaggctgaatggggtcccccgactctggctttcccccaggtgtacatgttcctggtgaaatggcaggacctgagtgag

SEQ ID NO: 23870 - RNA, 91 nt, synthetic construct
  source 1..91: mol_type = other RNA
caaagcctctttggaggctgaatggggtcccccgactctggctttcccccaggtgtacatgttcctggtgaaatggcaggacctgagcgag

SEQ ID NO: 23871 - RNA, 91 nt, synthetic construct
  source 1..91: mol_type = other RNA
caaagcctctttggaggctgaatggggtcccccgactctggctttcccccaggtatacatgttcctggtgaaatggcaggacctgagcgag

SEQ ID NO: 23872 - RNA, 91 nt, synthetic construct
  source 1..91: mol_type = other RNA
caaagcctctttggaggctgaatggggtcccccgactctggctttcccccaggtatacatgttcctggtgaaatggcaggacctgagtgag

SEQ ID NO: 23873 - RNA, 91 nt, synthetic construct
  source 1..91: mol_type = other RNA
caaagcctctttggaggctgaatggggtcccccgactctggctttcccccaggtatacatgttcctggtgaaatggcaggacctgtcggag

SEQ ID NO: 23874 - RNA, 91 nt, synthetic construct
  source 1..91: mol_type = other RNA
caaagcctctttggaggctgaatggggtcccccgactctggctttcccccaggtctacatgttcctggtgaaatggcaggacctgagcgag

SEQ ID NO: 23875 - RNA, 91 nt, synthetic construct
  source 1..91: mol_type = other RNA
caaagcctctttggaggctgaatggggtcccccgactctggctttcccccaggtttacatgttcctggtgaaatggcaggacctgtcggag

SEQ ID NO: 23876 - RNA, 91 nt, synthetic construct
  source 1..91: mol_type = other RNA
caaagcctctttggaggctgaatggggtcccccgactctggctttcccccaggtctacatgttcctggtgaaatggcaggacctgtcggag

SEQ ID NO: 23877 - RNA, 91 nt, synthetic construct
  source 1..91: mol_type = other RNA
caaagcctctttggaggctgaatggggtcccccgactctggctttcccccaggtgtacatgttcctggtgaaatggcaggacctgagtgag

SEQ ID NO: 23878 - RNA, 91 nt, synthetic construct
  source 1..91: mol_type = other RNA
caaagcctctttggaggctgaatggggtcccccgactctggctttcccccaggtgtacatgttcctggtgaaatggcaggacctgtcggag

SEQ ID NO: 23879 - RNA, 91 nt, synthetic construct
  source 1..91: mol_type = other RNA
caaagcctctttggaggctgaatggggtcccccgactctggctttcccccaggtttacatgttcctggtgaaatggcaggacctgagcgag

SEQ ID NO: 23880 - RNA, 91 nt, synthetic construct
  source 1..91: mol_type = other RNA
caaagcctctttggaggctgaatggggtcccccgactctggctttcccccaggtttacatgttcctggtgaaatggcaggacctgagtgag

SEQ ID NO: 23881 - RNA, 91 nt, synthetic construct
  source 1..91: mol_type = other RNA
caaagcctctttggaggctgaatggggtcccccgactctggctttcccccaggtctacatgttcctggtgaaatggcaggacctgagtgag

SEQ ID NO: 23882 - RNA, 92 nt, synthetic construct
  source 1..92: mol_type = other RNA
gcaaagcctctttggaggctgaatggggtcccccgactctggctttcccccaggtgtacatgttcctggtgaaatggcaggacctgtcggag

SEQ ID NO: 23883 - RNA, 92 nt, synthetic construct
  source 1..92: mol_type = other RNA
gcaaagcctctttggaggctgaatggggtcccccgactctggctttcccccaggtgtacatgttcctggtgaaatggcaggacctgagcgag

SEQ ID NO: 23884 - RNA, 92 nt, synthetic construct
  source 1..92: mol_type = other RNA
gcaaagcctctttggaggctgaatggggtcccccgactctggctttcccccaggtatacatgttcctggtgaaatggcaggacctgagcgag

SEQ ID NO: 23885 - RNA, 92 nt, synthetic construct
  source 1..92: mol_type = other RNA
gcaaagcctctttggaggctgaatggggtcccccgactctggctttcccccaggtatacatgttcctggtgaaatggcaggacctgagtgag

SEQ ID NO: 23886 - RNA, 92 nt, synthetic construct
  source 1..92: mol_type = other RNA
gcaaagcctctttggaggctgaatggggtcccccgactctggctttcccccaggtatacatgttcctggtgaaatggcaggacctgtcggag

SEQ ID NO: 23887 - RNA, 92 nt, synthetic construct
  source 1..92: mol_type = other RNA
gcaaagcctctttggaggctgaatggggtcccccgactctggctttcccccaggtctacatgttcctggtgaaatggcaggacctgagtgag

SEQ ID NO: 23888 - RNA, 92 nt, synthetic construct
  source 1..92: mol_type = other RNA
gcaaagcctctttggaggctgaatggggtcccccgactctggctttcccccaggtgtacatgttcctggtgaaatggcaggacctgagtgag

SEQ ID NO: 23889 - RNA, 92 nt, synthetic construct
  source 1..92: mol_type = other RNA
gcaaagcctctttggaggctgaatggggtcccccgactctggctttcccccaggtctacatgttcctggtgaaatggcaggacctgagcgag

SEQ ID NO: 23890 - RNA, 92 nt, synthetic construct
  source 1..92: mol_type = other RNA
gcaaagcctctttggaggctgaatggggtcccccgactctggctttcccccaggtttacatgttcctggtgaaatggcaggacctgagcgag

SEQ ID NO: 23891 - RNA, 92 nt, synthetic construct
  source 1..92: mol_type = other RNA
gcaaagcctctttggaggctgaatggggtcccccgactctggctttcccccaggtttacatgttcctggtgaaatggcaggacctgagtgag

SEQ ID NO: 23892 - RNA, 92 nt, synthetic construct
  source 1..92: mol_type = other RNA
gcaaagcctctttggaggctgaatggggtcccccgactctggctttcccccaggtttacatgttcctggtgaaatggcaggacctgtcggag

SEQ ID NO: 23893 - RNA, 92 nt, synthetic construct
  source 1..92: mol_type = other RNA
gcaaagcctctttggaggctgaatggggtcccccgactctggctttcccccaggtctacatgttcctggtgaaatggcaggacctgtcggag

SEQ ID NO: 23894 - RNA, 93 nt, synthetic construct
  source 1..93: mol_type = other RNA
agcaaagcctctttggaggctgaatggggtcccccgactctggctttcccccaggtatacatgttcctggtgaaatggcaggacctgagtgag

SEQ ID NO: 23895 - RNA, 93 nt, synthetic construct
  source 1..93: mol_type = other RNA
agcaaagcctctttggaggctgaatggggtcccccgactctggctttcccccaggtatacatgttcctggtgaaatggcaggacctgtcggag

SEQ ID NO: 23896 - RNA, 93 nt, synthetic construct
  source 1..93: mol_type = other RNA
agcaaagcctctttggaggctgaatggggtcccccgactctggctttcccccaggtctacatgttcctggtgaaatggcaggacctgagcgag

SEQ ID NO: 23897 - RNA, 93 nt, synthetic construct
  source 1..93: mol_type = other RNA
agcaaagcctctttggaggctgaatggggtcccccgactctggctttcccccaggtctacatgttcctggtgaaatggcaggacctgagtgag

SEQ ID NO: 23898 - RNA, 93 nt, synthetic construct
  source 1..93: mol_type = other RNA
agcaaagcctctttggaggctgaatggggtcccccgactctggctttcccccaggtctacatgttcctggtgaaatggcaggacctgtcggag

SEQ ID NO: 23899 - RNA, 93 nt, synthetic construct
  source 1..93: mol_type = other RNA
agcaaagcctctttggaggctgaatggggtcccccgactctggctttcccccaggtgtacatgttcctggtgaaatggcaggacctgagcgag

SEQ ID NO: 23900 - RNA, 93 nt, synthetic construct
  source 1..93: mol_type = other RNA
agcaaagcctctttggaggctgaatggggtcccccgactctggctttcccccaggtgtacatgttcctggtgaaatggcaggacctgtcggag

SEQ ID NO: 23901 - RNA, 93 nt, synthetic construct
  source 1..93: mol_type = other RNA
agcaaagcctctttggaggctgaatggggtcccccgactctggctttcccccaggtttacatgttcctggtgaaatggcaggacctgtcggag

SEQ ID NO: 23902 - RNA, 93 nt, synthetic construct
  source 1..93: mol_type = other RNA
agcaaagcctctttggaggctgaatggggtcccccgactctggctttcccccaggtttacatgttcctggtgaaatggcaggacctgagtgag

SEQ ID NO: 23903 - RNA, 93 nt, synthetic construct
  source 1..93: mol_type = other RNA
agcaaagcctctttggaggctgaatggggtcccccgactctggctttcccccaggtatacatgttcctggtgaaatggcaggacctgagcgag

SEQ ID NO: 23904 - RNA, 93 nt, synthetic construct
  source 1..93: mol_type = other RNA
agcaaagcctctttggaggctgaatggggtcccccgactctggctttcccccaggtgtacatgttcctggtgaaatggcaggacctgagtgag

SEQ ID NO: 23905 - RNA, 93 nt, synthetic construct
  source 1..93: mol_type = other RNA
agcaaagcctctttggaggctgaatggggtcccccgactctggctttcccccaggtttacatgttcctggtgaaatggcaggacctgagcgag

SEQ ID NO: 23906 - RNA, 94 nt, synthetic construct
  source 1..94: mol_type = other RNA
cagcaaagcctctttggaggctgaatggggtcccccgactctggctttcccccaggtatacatgttcctggtgaaatggcaggacctgagtgag

SEQ ID NO: 23907 - RNA, 94 nt, synthetic construct
  source 1..94: mol_type = other RNA
cagcaaagcctctttggaggctgaatggggtcccccgactctggctttcccccaggtatacatgttcctggtgaaatggcaggacctgagcgag

SEQ ID NO: 23908 - RNA, 94 nt, synthetic construct
  source 1..94: mol_type = other RNA
cagcaaagcctctttggaggctgaatggggtcccccgactctggctttcccccaggtctacatgttcctggtgaaatggcaggacctgagcgag

SEQ ID NO: 23909 - RNA, 94 nt, synthetic construct
  source 1..94: mol_type = other RNA
cagcaaagcctctttggaggctgaatggggtcccccgactctggctttcccccaggtctacatgttcctggtgaaatggcaggacctgtcggag

SEQ ID NO: 23910 - RNA, 94 nt, synthetic construct
  source 1..94: mol_type = other RNA
cagcaaagcctctttggaggctgaatggggtcccccgactctggctttcccccaggtctacatgttcctggtgaaatggcaggacctgagtgag

SEQ ID NO: 23911 - RNA, 94 nt, synthetic construct
  source 1..94: mol_type = other RNA
cagcaaagcctctttggaggctgaatggggtcccccgactctggctttcccccaggtttacatgttcctggtgaaatggcaggacctgagcgag

SEQ ID NO: 23912 - RNA, 94 nt, synthetic construct
  source 1..94: mol_type = other RNA
cagcaaagcctctttggaggctgaatggggtcccccgactctggctttcccccaggtgtacatgttcctggtgaaatggcaggacctgagcgag

SEQ ID NO: 23913 - RNA, 94 nt, synthetic construct
  source 1..94: mol_type = other RNA
cagcaaagcctctttggaggctgaatggggtcccccgactctggctttcccccaggtgtacatgttcctggtgaaatggcaggacctgagtgag

SEQ ID NO: 23914 - RNA, 94 nt, synthetic construct
  source 1..94: mol_type = other RNA
cagcaaagcctctttggaggctgaatggggtcccccgactctggctttcccccaggtttacatgttcctggtgaaatggcaggacctgagtgag

SEQ ID NO: 23915 - RNA, 94 nt, synthetic construct
  source 1..94: mol_type = other RNA
cagcaaagcctctttggaggctgaatggggtcccccgactctggctttcccccaggtttacatgttcctggtgaaatggcaggacctgtcggag

SEQ ID NO: 23916 - RNA, 94 nt, synthetic construct
  source 1..94: mol_type = other RNA
cagcaaagcctctttggaggctgaatggggtcccccgactctggctttcccccaggtgtacatgttcctggtgaaatggcaggacctgtcggag

SEQ ID NO: 23917 - RNA, 94 nt, synthetic construct
  source 1..94: mol_type = other RNA
cagcaaagcctctttggaggctgaatggggtcccccgactctggctttcccccaggtatacatgttcctggtgaaatggcaggacctgtcggag

SEQ ID NO: 23918 - RNA, 95 nt, synthetic construct
  source 1..95: mol_type = other RNA
acagcaaagcctctttggaggctgaatggggtcccccgactctggctttcccccaggtctacatgttcctggtgaaatggcaggacctgtcggag

SEQ ID NO: 23919 - RNA, 95 nt, synthetic construct
  source 1..95: mol_type = other RNA
acagcaaagcctctttggaggctgaatggggtcccccgactctggctttcccccaggtatacatgttcctggtgaaatggcaggacctgagcgag

SEQ ID NO: 23920 - RNA, 95 nt, synthetic construct
  source 1..95: mol_type = other RNA
acagcaaagcctctttggaggctgaatggggtcccccgactctggctttcccccaggtgtacatgttcctggtgaaatggcaggacctgagtgag

SEQ ID NO: 23921 - RNA, 95 nt, synthetic construct
  source 1..95: mol_type = other RNA
acagcaaagcctctttggaggctgaatggggtcccccgactctggctttcccccaggtttacatgttcctggtgaaatggcaggacctgagcgag

SEQ ID NO: 23922 - RNA, 95 nt, synthetic construct
  source 1..95: mol_type = other RNA
acagcaaagcctctttggaggctgaatggggtcccccgactctggctttcccccaggtttacatgttcctggtgaaatggcaggacctgtcggag

SEQ ID NO: 23923 - RNA, 95 nt, synthetic construct
  source 1..95: mol_type = other RNA
acagcaaagcctctttggaggctgaatggggtcccccgactctggctttcccccaggtgtacatgttcctggtgaaatggcaggacctgtcggag

SEQ ID NO: 23924 - RNA, 95 nt, synthetic construct
  source 1..95: mol_type = other RNA
acagcaaagcctctttggaggctgaatggggtcccccgactctggctttcccccaggtttacatgttcctggtgaaatggcaggacctgagtgag

SEQ ID NO: 23925 - RNA, 95 nt, synthetic construct
  source 1..95: mol_type = other RNA
acagcaaagcctctttggaggctgaatggggtcccccgactctggctttcccccaggtctacatgttcctggtgaaatggcaggacctgagtgag

SEQ ID NO: 23926 - RNA, 95 nt, synthetic construct
  source 1..95: mol_type = other RNA
acagcaaagcctctttggaggctgaatggggtcccccgactctggctttcccccaggtctacatgttcctggtgaaatggcaggacctgagcgag

SEQ ID NO: 23927 - RNA, 95 nt, synthetic construct
  source 1..95: mol_type = other RNA
acagcaaagcctctttggaggctgaatggggtcccccgactctggctttcccccaggtatacatgttcctggtgaaatggcaggacctgtcggag

SEQ ID NO: 23928 - RNA, 95 nt, synthetic construct
  source 1..95: mol_type = other RNA
acagcaaagcctctttggaggctgaatggggtcccccgactctggctttcccccaggtgtacatgttcctggtgaaatggcaggacctgagcgag

SEQ ID NO: 23929 - RNA, 95 nt, synthetic construct
  source 1..95: mol_type = other RNA
acagcaaagcctctttggaggctgaatggggtcccccgactctggctttcccccaggtatacatgttcctggtgaaatggcaggacctgagtgag

SEQ ID NO: 23930 - RNA, 96 nt, synthetic construct
  source 1..96: mol_type = other RNA
cacagcaaagcctctttggaggctgaatggggtcccccgactctggctttcccccaggtgtacatgttcctggtgaaatggcaggacctgtcggag

SEQ ID NO: 23931 - RNA, 96 nt, synthetic construct
  source 1..96: mol_type = other RNA
cacagcaaagcctctttggaggctgaatggggtcccccgactctggctttcccccaggtctacatgttcctggtgaaatggcaggacctgagtgag

SEQ ID NO: 23932 - RNA, 96 nt, synthetic construct
  source 1..96: mol_type = other RNA
cacagcaaagcctctttggaggctgaatggggtcccccgactctggctttcccccaggtatacatgttcctggtgaaatggcaggacctgagtgag

SEQ ID NO: 23933 - RNA, 96 nt, synthetic construct
  source 1..96: mol_type = other RNA
cacagcaaagcctctttggaggctgaatggggtcccccgactctggctttcccccaggtatacatgttcctggtgaaatggcaggacctgtcggag

SEQ ID NO: 23934 - RNA, 96 nt, synthetic construct
  source 1..96: mol_type = other RNA
cacagcaaagcctctttggaggctgaatggggtcccccgactctggctttcccccaggtctacatgttcctggtgaaatggcaggacctgtcggag

SEQ ID NO: 23935 - RNA, 96 nt, synthetic construct
  source 1..96: mol_type = other RNA
cacagcaaagcctctttggaggctgaatggggtcccccgactctggctttcccccaggtttacatgttcctggtgaaatggcaggacctgagcgag

SEQ ID NO: 23936 - RNA, 96 nt, synthetic construct
  source 1..96: mol_type = other RNA
cacagcaaagcctctttggaggctgaatggggtcccccgactctggctttcccccaggtgtacatgttcctggtgaaatggcaggacctgagtgag

SEQ ID NO: 23937 - RNA, 96 nt, synthetic construct
  source 1..96: mol_type = other RNA
cacagcaaagcctctttggaggctgaatggggtcccccgactctggctttcccccaggtttacatgttcctggtgaaatggcaggacctgagtgag

SEQ ID NO: 23938 - RNA, 96 nt, synthetic construct
  source 1..96: mol_type = other RNA
cacagcaaagcctctttggaggctgaatggggtcccccgactctggctttcccccaggtttacatgttcctggtgaaatggcaggacctgtcggag

SEQ ID NO: 23939 - RNA, 96 nt, synthetic construct
  source 1..96: mol_type = other RNA
cacagcaaagcctctttggaggctgaatggggtcccccgactctggctttcccccaggtatacatgttcctggtgaaatggcaggacctgagcgag

SEQ ID NO: 23940 - RNA, 96 nt, synthetic construct
  source 1..96: mol_type = other RNA
cacagcaaagcctctttggaggctgaatggggtcccccgactctggctttcccccaggtgtacatgttcctggtgaaatggcaggacctgagcgag

SEQ ID NO: 23941 - RNA, 96 nt, synthetic construct
  source 1..96: mol_type = other RNA
cacagcaaagcctctttggaggctgaatggggtcccccgactctggctttcccccaggtctacatgttcctggtgaaatggcaggacctgagcgag

SEQ ID NO: 23942 - RNA, 97 nt, synthetic construct
  source 1..97: mol_type = other RNA
acacagcaaagcctctttggaggctgaatggggtcccccgactctggctttcccccaggtatacatgttcctggtgaaatggcaggacctgtcggag

SEQ ID NO: 23943 - RNA, 97 nt, synthetic construct
  source 1..97: mol_type = other RNA
acacagcaaagcctctttggaggctgaatggggtcccccgactctggctttcccccaggtatacatgttcctggtgaaatggcaggacctgagtgag

SEQ ID NO: 23944 - RNA, 97 nt, synthetic construct
  source 1..97: mol_type = other RNA
acacagcaaagcctctttggaggctgaatggggtcccccgactctggctttcccccaggtatacatgttcctggtgaaatggcaggacctgagcgag

SEQ ID NO: 23945 - RNA, 97 nt, synthetic construct
  source 1..97: mol_type = other RNA
acacagcaaagcctctttggaggctgaatggggtcccccgactctggctttcccccaggtgtacatgttcctggtgaaatggcaggacctgagcgag

SEQ ID NO: 23946 - RNA, 97 nt, synthetic construct
  source 1..97: mol_type = other RNA
acacagcaaagcctctttggaggctgaatggggtcccccgactctggctttcccccaggtgtacatgttcctggtgaaatggcaggacctgagtgag

SEQ ID NO: 23947 - RNA, 97 nt, synthetic construct
  source 1..97: mol_type = other RNA
acacagcaaagcctctttggaggctgaatggggtcccccgactctggctttcccccaggtctacatgttcctggtgaaatggcaggacctgagcgag

SEQ ID NO: 23948 - RNA, 97 nt, synthetic construct
  source 1..97: mol_type = other RNA
acacagcaaagcctctttggaggctgaatggggtcccccgactctggctttcccccaggtgtacatgttcctggtgaaatggcaggacctgtcggag

SEQ ID NO: 23949 - RNA, 97 nt, synthetic construct
  source 1..97: mol_type = other RNA
acacagcaaagcctctttggaggctgaatggggtcccccgactctggctttcccccaggtttacatgttcctggtgaaatggcaggacctgagtgag

SEQ ID NO: 23950 - RNA, 97 nt, synthetic construct
  source 1..97: mol_type = other RNA
acacagcaaagcctctttggaggctgaatggggtcccccgactctggctttcccccaggtttacatgttcctggtgaaatggcaggacctgagcgag

SEQ ID NO: 23951 - RNA, 97 nt, synthetic construct
  source 1..97: mol_type = other RNA
acacagcaaagcctctttggaggctgaatggggtcccccgactctggctttcccccaggtctacatgttcctggtgaaatggcaggacctgagtgag

SEQ ID NO: 23952 - RNA, 97 nt, synthetic construct
  source 1..97: mol_type = other RNA
acacagcaaagcctctttggaggctgaatggggtcccccgactctggctttcccccaggtctacatgttcctggtgaaatggcaggacctgtcggag

SEQ ID NO: 23953 - RNA, 97 nt, synthetic construct
  source 1..97: mol_type = other RNA
acacagcaaagcctctttggaggctgaatggggtcccccgactctggctttcccccaggtttacatgttcctggtgaaatggcaggacctgtcggag

SEQ ID NO: 23954 - RNA, 98 nt, synthetic construct
  source 1..98: mol_type = other RNA
cacacagcaaagcctctttggaggctgaatggggtcccccgactctggctttcccccaggtgtacatgttcctggtgaaatggcaggacctgtcggag

SEQ ID NO: 23955 - RNA, 98 nt, synthetic construct
  source 1..98: mol_type = other RNA
cacacagcaaagcctctttggaggctgaatggggtcccccgactctggctttcccccaggtttacatgttcctggtgaaatggcaggacctgtcggag

SEQ ID NO: 23956 - RNA, 98 nt, synthetic construct
  source 1..98: mol_type = other RNA
cacacagcaaagcctctttggaggctgaatggggtcccccgactctggctttcccccaggtgtacatgttcctggtgaaatggcaggacctgagtgag

SEQ ID NO: 23957 - RNA, 98 nt, synthetic construct
  source 1..98: mol_type = other RNA
cacacagcaaagcctctttggaggctgaatggggtcccccgactctggctttcccccaggtgtacatgttcctggtgaaatggcaggacctgagcgag

SEQ ID NO: 23958 - RNA, 98 nt, synthetic construct
  source 1..98: mol_type = other RNA
cacacagcaaagcctctttggaggctgaatggggtcccccgactctggctttcccccaggtatacatgttcctggtgaaatggcaggacctgtcggag

SEQ ID NO: 23959 - RNA, 98 nt, synthetic construct
  source 1..98: mol_type = other RNA
cacacagcaaagcctctttggaggctgaatggggtcccccgactctggctttcccccaggtctacatgttcctggtgaaatggcaggacctgagtgag

SEQ ID NO: 23960 - RNA, 98 nt, synthetic construct
  source 1..98: mol_type = other RNA
cacacagcaaagcctctttggaggctgaatggggtcccccgactctggctttcccccaggtttacatgttcctggtgaaatggcaggacctgagtgag

SEQ ID NO: 23961 - RNA, 98 nt, synthetic construct
  source 1..98: mol_type = other RNA
cacacagcaaagcctctttggaggctgaatggggtcccccgactctggctttcccccaggtatacatgttcctggtgaaatggcaggacctgagtgag

SEQ ID NO: 23962 - RNA, 98 nt, synthetic construct
  source 1..98: mol_type = other RNA
cacacagcaaagcctctttggaggctgaatggggtcccccgactctggctttcccccaggtatacatgttcctggtgaaatggcaggacctgagcgag

SEQ ID NO: 23963 - RNA, 98 nt, synthetic construct
  source 1..98: mol_type = other RNA
cacacagcaaagcctctttggaggctgaatggggtcccccgactctggctttcccccaggtctacatgttcctggtgaaatggcaggacctgtcggag

SEQ ID NO: 23964 - RNA, 98 nt, synthetic construct
  source 1..98: mol_type = other RNA
cacacagcaaagcctctttggaggctgaatggggtcccccgactctggctttcccccaggtttacatgttcctggtgaaatggcaggacctgagcgag

SEQ ID NO: 23965 - RNA, 98 nt, synthetic construct
  source 1..98: mol_type = other RNA
cacacagcaaagcctctttggaggctgaatggggtcccccgactctggctttcccccaggtctacatgttcctggtgaaatggcaggacctgagcgag

SEQ ID NO: 23966 - RNA, 99 nt, synthetic construct
  source 1..99: mol_type = other RNA
gcacacagcaaagcctctttggaggctgaatggggtcccccgactctggctttcccccaggtctacatgttcctggtgaaatggcaggacctgagtgag

SEQ ID NO: 23967 - RNA, 99 nt, synthetic construct
  source 1..99: mol_type = other RNA
gcacacagcaaagcctctttggaggctgaatggggtcccccgactctggctttcccccaggtctacatgttcctggtgaaatggcaggacctgtcggag

SEQ ID NO: 23968 - RNA, 99 nt, synthetic construct
  source 1..99: mol_type = other RNA
gcacacagcaaagcctctttggaggctgaatggggtcccccgactctggctttcccccaggtatacatgttcctggtgaaatggcaggacctgagtgag

SEQ ID NO: 23969 - RNA, 99 nt, synthetic construct
  source 1..99: mol_type = other RNA
gcacacagcaaagcctctttggaggctgaatggggtcccccgactctggctttcccccaggtatacatgttcctggtgaaatggcaggacctgtcggag

SEQ ID NO: 23970 - RNA, 99 nt, synthetic construct
  source 1..99: mol_type = other RNA
gcacacagcaaagcctctttggaggctgaatggggtcccccgactctggctttcccccaggtttacatgttcctggtgaaatggcaggacctgagtgag

SEQ ID NO: 23971 - RNA, 99 nt, synthetic construct
  source 1..99: mol_type = other RNA
gcacacagcaaagcctctttggaggctgaatggggtcccccgactctggctttcccccaggtttacatgttcctggtgaaatggcaggacctgtcggag

SEQ ID NO: 23972 - RNA, 99 nt, synthetic construct
  source 1..99: mol_type = other RNA
gcacacagcaaagcctctttggaggctgaatggggtcccccgactctggctttcccccaggtgtacatgttcctggtgaaatggcaggacctgtcggag

SEQ ID NO: 23973 - RNA, 99 nt, synthetic construct
  source 1..99: mol_type = other RNA
gcacacagcaaagcctctttggaggctgaatggggtcccccgactctggctttcccccaggtatacatgttcctggtgaaatggcaggacctgagcgag

SEQ ID NO: 23974 - RNA, 99 nt, synthetic construct
  source 1..99: mol_type = other RNA
gcacacagcaaagcctctttggaggctgaatggggtcccccgactctggctttcccccaggtttacatgttcctggtgaaatggcaggacctgagcgag

SEQ ID NO: 23975 - RNA, 99 nt, synthetic construct
  source 1..99: mol_type = other RNA
gcacacagcaaagcctctttggaggctgaatggggtcccccgactctggctttcccccaggtctacatgttcctggtgaaatggcaggacctgagcgag

SEQ ID NO: 23976 - RNA, 99 nt, synthetic construct
  source 1..99: mol_type = other RNA
gcacacagcaaagcctctttggaggctgaatggggtcccccgactctggctttcccccaggtgtacatgttcctggtgaaatggcaggacctgagtgag

SEQ ID NO: 23977 - RNA, 99 nt, synthetic construct
  source 1..99: mol_type = other RNA
gcacacagcaaagcctctttggaggctgaatggggtcccccgactctggctttcccccaggtgtacatgttcctggtgaaatggcaggacctgagcgag

SEQ ID NO: 23978 - RNA, 100 nt, synthetic construct
  source 1..100: mol_type = other RNA
tgcacacagcaaagcctctttggaggctgaatggggtcccccgactctggctttcccccaggtttacatgttcctggtgaaatggcaggacctgagtgag

SEQ ID NO: 23979 - RNA, 100 nt, synthetic construct
  source 1..100: mol_type = other RNA
tgcacacagcaaagcctctttggaggctgaatggggtcccccgactctggctttcccccaggtatacatgttcctggtgaaatggcaggacctgagcgag

SEQ ID NO: 23980 - RNA, 100 nt, synthetic construct
  source 1..100: mol_type = other RNA
tgcacacagcaaagcctctttggaggctgaatggggtcccccgactctggctttcccccaggtatacatgttcctggtgaaatggcaggacctgagtgag

SEQ ID NO: 23981 - RNA, 100 nt, synthetic construct
  source 1..100: mol_type = other RNA
tgcacacagcaaagcctctttggaggctgaatggggtcccccgactctggctttcccccaggtatacatgttcctggtgaaatggcaggacctgtcggag

SEQ ID NO: 23982 - RNA, 100 nt, synthetic construct
  source 1..100: mol_type = other RNA
tgcacacagcaaagcctctttggaggctgaatggggtcccccgactctggctttcccccaggtctacatgttcctggtgaaatggcaggacctgagtgag

SEQ ID NO: 23983 - RNA, 100 nt, synthetic construct
  source 1..100: mol_type = other RNA
tgcacacagcaaagcctctttggaggctgaatggggtcccccgactctggctttcccccaggtctacatgttcctggtgaaatggcaggacctgtcggag

SEQ ID NO: 23984 - RNA, 100 nt, synthetic construct
  source 1..100: mol_type = other RNA
tgcacacagcaaagcctctttggaggctgaatggggtcccccgactctggctttcccccaggtgtacatgttcctggtgaaatggcaggacctgagcgag

SEQ ID NO: 23985 - RNA, 100 nt, synthetic construct
  source 1..100: mol_type = other RNA
tgcacacagcaaagcctctttggaggctgaatggggtcccccgactctggctttcccccaggtgtacatgttcctggtgaaatggcaggacctgagtgag

SEQ ID NO: 23986 - RNA, 100 nt, synthetic construct
  source 1..100: mol_type = other RNA
tgcacacagcaaagcctctttggaggctgaatggggtcccccgactctggctttcccccaggtttacatgttcctggtgaaatggcaggacctgtcggag

SEQ ID NO: 23987 - RNA, 100 nt, synthetic construct
  source 1..100: mol_type = other RNA
tgcacacagcaaagcctctttggaggctgaatggggtcccccgactctggctttcccccaggtgtacatgttcctggtgaaatggcaggacctgtcggag

SEQ ID NO: 23988 - RNA, 100 nt, synthetic construct
  source 1..100: mol_type = other RNA
tgcacacagcaaagcctctttggaggctgaatggggtcccccgactctggctttcccccaggtttacatgttcctggtgaaatggcaggacctgagcgag

SEQ ID NO: 23989 - RNA, 100 nt, synthetic construct
  source 1..100: mol_type = other RNA
tgcacacagcaaagcctctttggaggctgaatggggtcccccgactctggctttcccccaggtctacatgttcctggtgaaatggcaggacctgagcgag

SEQ ID NO: 23990 - RNA, 101 nt, synthetic construct
  source 1..101: mol_type = other RNA
gtgcacacagcaaagcctctttggaggctgaatggggtcccccgactctggctttcccccaggtttacatgttcctggtgaaatggcaggacctgagcgag

SEQ ID NO: 23991 - RNA, 101 nt, synthetic construct
  source 1..101: mol_type = other RNA
gtgcacacagcaaagcctctttggaggctgaatggggtcccccgactctggctttcccccaggtctacatgttcctggtgaaatggcaggacctgtcggag

SEQ ID NO: 23992 - RNA, 101 nt, synthetic construct
  source 1..101: mol_type = other RNA
gtgcacacagcaaagcctctttggaggctgaatggggtcccccgactctggctttcccccaggtttacatgttcctggtgaaatggcaggacctgtcggag

SEQ ID NO: 23993 - RNA, 101 nt, synthetic construct
  source 1..101: mol_type = other RNA
gtgcacacagcaaagcctctttggaggctgaatggggtcccccgactctggctttcccccaggtctacatgttcctggtgaaatggcaggacctgagcgag

SEQ ID NO: 23994 - RNA, 101 nt, synthetic construct
  source 1..101: mol_type = other RNA
gtgcacacagcaaagcctctttggaggctgaatggggtcccccgactctggctttcccccaggtgtacatgttcctggtgaaatggcaggacctgtcggag

SEQ ID NO: 23995 - RNA, 101 nt, synthetic construct
  source 1..101: mol_type = other RNA
gtgcacacagcaaagcctctttggaggctgaatggggtcccccgactctggctttcccccaggtgtacatgttcctggtgaaatggcaggacctgagcgag

SEQ ID NO: 23996 - RNA, 101 nt, synthetic construct
  source 1..101: mol_type = other RNA
gtgcacacagcaaagcctctttggaggctgaatggggtcccccgactctggctttcccccaggtgtacatgttcctggtgaaatggcaggacctgagtgag

SEQ ID NO: 23997 - RNA, 101 nt, synthetic construct
  source 1..101: mol_type = other RNA
gtgcacacagcaaagcctctttggaggctgaatggggtcccccgactctggctttcccccaggtatacatgttcctggtgaaatggcaggacctgtcggag

SEQ ID NO: 23998 - RNA, 101 nt, synthetic construct
  source 1..101: mol_type = other RNA
gtgcacacagcaaagcctctttggaggctgaatggggtcccccgactctggctttcccccaggtttacatgttcctggtgaaatggcaggacctgagtgag

SEQ ID NO: 23999 - RNA, 101 nt, synthetic construct
  source 1..101: mol_type = other RNA
gtgcacacagcaaagcctctttggaggctgaatggggtcccccgactctggctttcccccaggtctacatgttcctggtgaaatggcaggacctgagtgag

SEQ ID NO: 24000 - RNA, 101 nt, synthetic construct
  source 1..101: mol_type = other RNA
gtgcacacagcaaagcctctttggaggctgaatggggtcccccgactctggctttcccccaggtatacatgttcctggtgaaatggcaggacctgagtgag

SEQ ID NO: 24001 - RNA, 101 nt, synthetic construct
  source 1..101: mol_type = other RNA
gtgcacacagcaaagcctctttggaggctgaatggggtcccccgactctggctttcccccaggtatacatgttcctggtgaaatggcaggacctgagcgag

SEQ ID NO: 24002 - RNA, 102 nt, synthetic construct
  source 1..102: mol_type = other RNA
ggtgcacacagcaaagcctctttggaggctgaatggggtcccccgactctggctttcccccaggtctacatgttcctggtgaaatggcaggacctgtcggag

SEQ ID NO: 24003 - RNA, 102 nt, synthetic construct
  source 1..102: mol_type = other RNA
ggtgcacacagcaaagcctctttggaggctgaatggggtcccccgactctggctttcccccaggtatacatgttcctggtgaaatggcaggacctgagtgag

SEQ ID NO: 24004 - RNA, 102 nt, synthetic construct
  source 1..102: mol_type = other RNA
ggtgcacacagcaaagcctctttggaggctgaatggggtcccccgactctggctttcccccaggtatacatgttcctggtgaaatggcaggacctgtcggag

SEQ ID NO: 24005 - RNA, 102 nt, synthetic construct
  source 1..102: mol_type = other RNA
ggtgcacacagcaaagcctctttggaggctgaatggggtcccccgactctggctttcccccaggtctacatgttcctggtgaaatggcaggacctgagcgag

SEQ ID NO: 24006 - RNA, 102 nt, synthetic construct
  source 1..102: mol_type = other RNA
ggtgcacacagcaaagcctctttggaggctgaatggggtcccccgactctggctttcccccaggtctacatgttcctggtgaaatggcaggacctgagtgag

SEQ ID NO: 24007 - RNA, 102 nt, synthetic construct
  source 1..102: mol_type = other RNA
ggtgcacacagcaaagcctctttggaggctgaatggggtcccccgactctggctttcccccaggtgtacatgttcctggtgaaatggcaggacctgagcgag

SEQ ID NO: 24008 - RNA, 102 nt, synthetic construct
  source 1..102: mol_type = other RNA
ggtgcacacagcaaagcctctttggaggctgaatggggtcccccgactctggctttcccccaggtgtacatgttcctggtgaaatggcaggacctgagtgag

SEQ ID NO: 24009 - RNA, 102 nt, synthetic construct
  source 1..102: mol_type = other RNA
ggtgcacacagcaaagcctctttggaggctgaatggggtcccccgactctggctttcccccaggtgtacatgttcctggtgaaatggcaggacctgtcggag

SEQ ID NO: 24010 - RNA, 102 nt, synthetic construct
  source 1..102: mol_type = other RNA
ggtgcacacagcaaagcctctttggaggctgaatggggtcccccgactctggctttcccccaggtttacatgttcctggtgaaatggcaggacctgagtgag

SEQ ID NO: 24011 - RNA, 102 nt, synthetic construct
  source 1..102: mol_type = other RNA
ggtgcacacagcaaagcctctttggaggctgaatggggtcccccgactctggctttcccccaggtatacatgttcctggtgaaatggcaggacctgagcgag

SEQ ID NO: 24012 - RNA, 102 nt, synthetic construct
  source 1..102: mol_type = other RNA
ggtgcacacagcaaagcctctttggaggctgaatggggtcccccgactctggctttcccccaggtttacatgttcctggtgaaatggcaggacctgtcggag

SEQ ID NO: 24013 - RNA, 102 nt, synthetic construct
  source 1..102: mol_type = other RNA
ggtgcacacagcaaagcctctttggaggctgaatggggtcccccgactctggctttcccccaggtttacatgttcctggtgaaatggcaggacctgagcgag

SEQ ID NO: 24014 - RNA, 103 nt, synthetic construct
  source 1..103: mol_type = other RNA
gggtgcacacagcaaagcctctttggaggctgaatggggtcccccgactctggctttcccccaggtatacatgttcctggtgaaatggcaggacctgtcggag

SEQ ID NO: 24015 - RNA, 103 nt, synthetic construct
  source 1..103: mol_type = other RNA
gggtgcacacagcaaagcctctttggaggctgaatggggtcccccgactctggctttcccccaggtttacatgttcctggtgaaatggcaggacctgagcgag

SEQ ID NO: 24016 - RNA, 103 nt, synthetic construct
  source 1..103: mol_type = other RNA
gggtgcacacagcaaagcctctttggaggctgaatggggtcccccgactctggctttcccccaggtgtacatgttcctggtgaaatggcaggacctgtcggag

SEQ ID NO: 24017 - RNA, 103 nt, synthetic construct
  source 1..103: mol_type = other RNA
gggtgcacacagcaaagcctctttggaggctgaatggggtcccccgactctggctttcccccaggtgtacatgttcctggtgaaatggcaggacctgagtgag

SEQ ID NO: 24018 - RNA, 103 nt, synthetic construct
  source 1..103: mol_type = other RNA
gggtgcacacagcaaagcctctttggaggctgaatggggtcccccgactctggctttcccccaggtgtacatgttcctggtgaaatggcaggacctgagcgag

SEQ ID NO: 24019 - RNA, 103 nt, synthetic construct
  source 1..103: mol_type = other RNA
gggtgcacacagcaaagcctctttggaggctgaatggggtcccccgactctggctttcccccaggtttacatgttcctggtgaaatggcaggacctgagtgag

SEQ ID NO: 24020 - RNA, 103 nt, synthetic construct
  source 1..103: mol_type = other RNA
gggtgcacacagcaaagcctctttggaggctgaatggggtcccccgactctggctttcccccaggtctacatgttcctggtgaaatggcaggacctgagtgag

SEQ ID NO: 24021 - RNA, 103 nt, synthetic construct
  source 1..103: mol_type = other RNA
gggtgcacacagcaaagcctctttggaggctgaatggggtcccccgactctggctttcccccaggtttacatgttcctggtgaaatggcaggacctgtcggag

SEQ ID NO: 24022 - RNA, 103 nt, synthetic construct
  source 1..103: mol_type = other RNA
gggtgcacacagcaaagcctctttggaggctgaatggggtcccccgactctggctttcccccaggtctacatgttcctggtgaaatggcaggacctgtcggag

SEQ ID NO: 24023 - RNA, 103 nt, synthetic construct
  source 1..103: mol_type = other RNA
gggtgcacacagcaaagcctctttggaggctgaatggggtcccccgactctggctttcccccaggtatacatgttcctggtgaaatggcaggacctgagtgag

SEQ ID NO: 24024 - RNA, 103 nt, synthetic construct
  source 1..103: mol_type = other RNA
gggtgcacacagcaaagcctctttggaggctgaatggggtcccccgactctggctttcccccaggtctacatgttcctggtgaaatggcaggacctgagcgag

SEQ ID NO: 24025 - RNA, 103 nt, synthetic construct
  source 1..103: mol_type = other RNA
gggtgcacacagcaaagcctctttggaggctgaatggggtcccccgactctggctttcccccaggtatacatgttcctggtgaaatggcaggacctgagcgag

SEQ ID NO: 24026 - RNA, 20 nt, synthetic construct
  source 1..20: mol_type = other RNA
atggcaggacctgagtgaga

SEQ ID NO: 24027 - RNA, 20 nt, synthetic construct
  source 1..20: mol_type = other RNA
atggcaggacctgagcgaga

SEQ ID NO: 24028 - RNA, 20 nt, synthetic construct
  source 1..20: mol_type = other RNA
tggcaggacctgagcgagaa

SEQ ID NO: 24029 - RNA, 20 nt, synthetic construct
  source 1..20: mol_type = other RNA
tggcaggacctgagtgagaa

SEQ ID NO: 24030 - RNA, 20 nt, synthetic construct
  source 1..20: mol_type = other RNA
gaaatggcaggacctgagtg

SEQ ID NO: 24031 - RNA, 20 nt, synthetic construct
  source 1..20: mol_type = other RNA
gaaatggcaggacctgagcg

SEQ ID NO: 24032 - RNA, 20 nt, synthetic construct
  source 1..20: mol_type = other RNA
ggtgaaatggcaggacctga

SEQ ID NO: 24033 - RNA, 20 nt, synthetic construct
  source 1..20: mol_type = other RNA
gtgaaatggcaggacctgag

SEQ ID NO: 24034 - RNA, 16 nt, synthetic construct
  source 1..16: mol_type = other RNA
atccccacactcacat

SEQ ID NO: 24035 - RNA, 17 nt, synthetic construct
  source 1..17: mol_type = other RNA
catccccacactcacat

SEQ ID NO: 24036 - RNA, 18 nt, synthetic construct
  source 1..18: mol_type = other RNA
ccatccccacactcacat

SEQ ID NO: 24037 - RNA, 19 nt, synthetic construct
  source 1..19: mol_type = other RNA
tccatccccacactcacat

SEQ ID NO: 24038 - RNA, 20 nt, synthetic construct
  source 1..20: mol_type = other RNA
ctccatccccacactcacat

SEQ ID NO: 24039 - RNA, 21 nt, synthetic construct
  source 1..21: mol_type = other RNA
cctccatccccacactcacat

SEQ ID NO: 24040 - RNA, 22 nt, synthetic construct
  source 1..22: mol_type = other RNA
tcctccatccccacactcacat

SEQ ID NO: 24041-24047 - skipped (7 entries)

SEQ ID NO: 24048 - RNA, 10 nt, synthetic construct
  source 1..10: mol_type = other RNA
tgagtgtggg

SEQ ID NO: 24049 - RNA, 11 nt, synthetic construct
  source 1..11: mol_type = other RNA
tgagtgtgggg

SEQ ID NO: 24050 - RNA, 12 nt, synthetic construct
  source 1..12: mol_type = other RNA
tgagtgtgggga

SEQ ID NO: 24051 - RNA, 13 nt, synthetic construct
  source 1..13: mol_type = other RNA
tgagtgtggggat

SEQ ID NO: 24052 - RNA, 14 nt, synthetic construct
  source 1..14: mol_type = other RNA
tgagtgtggggatg

SEQ ID NO: 24053 - RNA, 15 nt, synthetic construct
  source 1..15: mol_type = other RNA
tgagtgtggggatgg

SEQ ID NO: 24054 - RNA, 16 nt, synthetic construct
  source 1..16: mol_type = other RNA
tgagtgtggggatgga

SEQ ID NO: 24055 - RNA, 17 nt, synthetic construct
  source 1..17: mol_type = other RNA
tgagtgtggggatggag

SEQ ID NO: 24056 - RNA, 18 nt, synthetic construct
  source 1..18: mol_type = other RNA
tgagtgtggggatggagg

SEQ ID NO: 24057 - RNA, 19 nt, synthetic construct
  source 1..19: mol_type = other RNA
tgagtgtggggatggagga

SEQ ID NO: 24058 - RNA, 82 nt, synthetic construct
  source 1..82: mol_type = other RNA
gtttacatgttcctggtgaaatggcaggacctgtcggagaaggtggtctaccggcgcttcaccgagatctacgagtttcatg

SEQ ID NO: 24059 - RNA, 82 nt, synthetic construct
  source 1..82: mol_type = other RNA
gtttacatgttcctggtgaaatggcaggacctgtcggagaaggtggtctaccggcgcttcaccgagatctacgagttccatg

SEQ ID NO: 24060 - RNA, 82 nt, synthetic construct
  source 1..82: mol_type = other RNA
gtatacatgttcctggtgaaatggcaggacctgtcggagaaggtggtctaccggcgcttcaccgagatctacgagttccatg

SEQ ID NO: 24061 - RNA, 82 nt, synthetic construct
  source 1..82: mol_type = other RNA
gtatacatgttcctggtgaaatggcaggacctgtcggagaaggtggtctaccggcgcttcaccgagatctacgagtttcatg

SEQ ID NO: 24062 - RNA, 82 nt, synthetic construct
  source 1..82: mol_type = other RNA
gtctacatgttcctggtgaaatggcaggacctgtcggagaaggtggtctaccggcgcttcaccgagatctacgagttccatg

SEQ ID NO: 24063 - RNA, 82 nt, synthetic construct
  source 1..82: mol_type = other RNA
gtctacatgttcctggtgaaatggcaggacctgtcggagaaggtggtctaccggcgcttcaccgagatctacgagtttcatg

SEQ ID NO: 24064 - RNA, 82 nt, synthetic construct
  source 1..82: mol_type = other RNA
gtgtacatgttcctggtgaaatggcaggacctgtcggagaaggtggtctaccggcgcttcaccgagatctacgagtttcatg

SEQ ID NO: 24065 - RNA, 82 nt, synthetic construct
  source 1..82: mol_type = other RNA
gtgtacatgttcctggtgaaatggcaggacctgtcggagaaggtggtctaccggcgcttcaccgagatctacgagttccatg

SEQ ID NO: 24066 - RNA, 83 nt, synthetic construct
  source 1..83: mol_type = other RNA
ggtttacatgttcctggtgaaatggcaggacctgtcggagaaggtggtctaccggcgcttcaccgagatctacgagttccatg

SEQ ID NO: 24067 - RNA, 83 nt, synthetic construct
  source 1..83: mol_type = other RNA
ggtatacatgttcctggtgaaatggcaggacctgtcggagaaggtggtctaccggcgcttcaccgagatctacgagttccatg

SEQ ID NO: 24068 - RNA, 83 nt, synthetic construct
  source 1..83: mol_type = other RNA
ggtatacatgttcctggtgaaatggcaggacctgtcggagaaggtggtctaccggcgcttcaccgagatctacgagtttcatg

SEQ ID NO: 24069 - RNA, 83 nt, synthetic construct
  source 1..83: mol_type = other RNA
ggtctacatgttcctggtgaaatggcaggacctgtcggagaaggtggtctaccggcgcttcaccgagatctacgagttccatg

SEQ ID NO: 24070 - RNA, 83 nt, synthetic construct
  source 1..83: mol_type = other RNA
ggtctacatgttcctggtgaaatggcaggacctgtcggagaaggtggtctaccggcgcttcaccgagatctacgagtttcatg

SEQ ID NO: 24071 - RNA, 83 nt, synthetic construct
  source 1..83: mol_type = other RNA
ggtgtacatgttcctggtgaaatggcaggacctgtcggagaaggtggtctaccggcgcttcaccgagatctacgagtttcatg

SEQ ID NO: 24072 - RNA, 83 nt, synthetic construct
  source 1..83: mol_type = other RNA
ggtgtacatgttcctggtgaaatggcaggacctgtcggagaaggtggtctaccggcgcttcaccgagatctacgagttccatg

SEQ ID NO: 24073 - RNA, 83 nt, synthetic construct
  source 1..83: mol_type = other RNA
ggtttacatgttcctggtgaaatggcaggacctgtcggagaaggtggtctaccggcgcttcaccgagatctacgagtttcatg

SEQ ID NO: 24074 - RNA, 84 nt, synthetic construct
  source 1..84: mol_type = other RNA
aggtttacatgttcctggtgaaatggcaggacctgtcggagaaggtggtctaccggcgcttcaccgagatctacgagtttcatg

SEQ ID NO: 24075 - RNA, 84 nt, synthetic construct
  source 1..84: mol_type = other RNA
aggtttacatgttcctggtgaaatggcaggacctgtcggagaaggtggtctaccggcgcttcaccgagatctacgagttccatg

SEQ ID NO: 24076 - RNA, 84 nt, synthetic construct
  source 1..84: mol_type = other RNA
aggtgtacatgttcctggtgaaatggcaggacctgtcggagaaggtggtctaccggcgcttcaccgagatctacgagtttcatg

SEQ ID NO: 24077 - RNA, 84 nt, synthetic construct
  source 1..84: mol_type = other RNA
aggtgtacatgttcctggtgaaatggcaggacctgtcggagaaggtggtctaccggcgcttcaccgagatctacgagttccatg

SEQ ID NO: 24078 - RNA, 84 nt, synthetic construct
  source 1..84: mol_type = other RNA
aggtctacatgttcctggtgaaatggcaggacctgtcggagaaggtggtctaccggcgcttcaccgagatctacgagttccatg

SEQ ID NO: 24079 - RNA, 84 nt, synthetic construct
  source 1..84: mol_type = other RNA
aggtatacatgttcctggtgaaatggcaggacctgtcggagaaggtggtctaccggcgcttcaccgagatctacgagtttcatg

SEQ ID NO: 24080 - RNA, 84 nt, synthetic construct
  source 1..84: mol_type = other RNA
aggtatacatgttcctggtgaaatggcaggacctgtcggagaaggtggtctaccggcgcttcaccgagatctacgagttccatg

SEQ ID NO: 24081 - RNA, 84 nt, synthetic construct
  source 1..84: mol_type = other RNA
aggtctacatgttcctggtgaaatggcaggacctgtcggagaaggtggtctaccggcgcttcaccgagatctacgagtttcatg

SEQ ID NO: 24082 - RNA, 85 nt, synthetic construct
  source 1..85: mol_type = other RNA
caggtctacatgttcctggtgaaatggcaggacctgtcggagaaggtggtctaccggcgcttcaccgagatctacgagttccatg

SEQ ID NO: 24083 - RNA, 85 nt, synthetic construct
  source 1..85: mol_type = other RNA
caggtttacatgttcctggtgaaatggcaggacctgtcggagaaggtggtctaccggcgcttcaccgagatctacgagttccatg

SEQ ID NO: 24084 - RNA, 85 nt, synthetic construct
  source 1..85: mol_type = other RNA
caggtgtacatgttcctggtgaaatggcaggacctgtcggagaaggtggtctaccggcgcttcaccgagatctacgagttccatg

SEQ ID NO: 24085 - RNA, 85 nt, synthetic construct
  source 1..85: mol_type = other RNA
caggtctacatgttcctggtgaaatggcaggacctgtcggagaaggtggtctaccggcgcttcaccgagatctacgagtttcatg

SEQ ID NO: 24086 - RNA, 85 nt, synthetic construct
  source 1..85: mol_type = other RNA
caggtatacatgttcctggtgaaatggcaggacctgtcggagaaggtggtctaccggcgcttcaccgagatctacgagtttcatg

SEQ ID NO: 24087 - RNA, 85 nt, synthetic construct
  source 1..85: mol_type = other RNA
caggtatacatgttcctggtgaaatggcaggacctgtcggagaaggtggtctaccggcgcttcaccgagatctacgagttccatg

SEQ ID NO: 24088 - RNA, 85 nt, synthetic construct
  source 1..85: mol_type = other RNA
caggtgtacatgttcctggtgaaatggcaggacctgtcggagaaggtggtctaccggcgcttcaccgagatctacgagtttcatg

SEQ ID NO: 24089 - RNA, 85 nt, synthetic construct
  source 1..85: mol_type = other RNA
caggtttacatgttcctggtgaaatggcaggacctgtcggagaaggtggtctaccggcgcttcaccgagatctacgagtttcatg

SEQ ID NO: 24090 - RNA, 86 nt, synthetic construct
  source 1..86: mol_type = other RNA
ccaggtctacatgttcctggtgaaatggcaggacctgtcggagaaggtggtctaccggcgcttcaccgagatctacgagtttcatg

SEQ ID NO: 24091 - RNA, 86 nt, synthetic construct
  source 1..86: mol_type = other RNA
ccaggtttacatgttcctggtgaaatggcaggacctgtcggagaaggtggtctaccggcgcttcaccgagatctacgagttccatg

SEQ ID NO: 24092 - RNA, 86 nt, synthetic construct
  source 1..86: mol_type = other RNA
ccaggtgtacatgttcctggtgaaatggcaggacctgtcggagaaggtggtctaccggcgcttcaccgagatctacgagttccatg

SEQ ID NO: 24093 - RNA, 86 nt, synthetic construct
  source 1..86: mol_type = other RNA
ccaggtgtacatgttcctggtgaaatggcaggacctgtcggagaaggtggtctaccggcgcttcaccgagatctacgagtttcatg

SEQ ID NO: 24094 - RNA, 86 nt, synthetic construct
  source 1..86: mol_type = other RNA
ccaggtctacatgttcctggtgaaatggcaggacctgtcggagaaggtggtctaccggcgcttcaccgagatctacgagttccatg

SEQ ID NO: 24095 - RNA, 86 nt, synthetic construct
  source 1..86: mol_type = other RNA
ccaggtatacatgttcctggtgaaatggcaggacctgtcggagaaggtggtctaccggcgcttcaccgagatctacgagtttcatg

SEQ ID NO: 24096 - RNA, 86 nt, synthetic construct
  source 1..86: mol_type = other RNA
ccaggtatacatgttcctggtgaaatggcaggacctgtcggagaaggtggtctaccggcgcttcaccgagatctacgagttccatg

SEQ ID NO: 24097 - RNA, 86 nt, synthetic construct
  source 1..86: mol_type = other RNA
ccaggtttacatgttcctggtgaaatggcaggacctgtcggagaaggtggtctaccggcgcttcaccgagatctacgagtttcatg

SEQ ID NO: 24098 - RNA, 87 nt, synthetic construct
  source 1..87: mol_type = other RNA
cccaggtttacatgttcctggtgaaatggcaggacctgtcggagaaggtggtctaccggcgcttcaccgagatctacgagttccatg

SEQ ID NO: 24099 - RNA, 87 nt, synthetic construct
  source 1..87: mol_type = other RNA
cccaggtgtacatgttcctggtgaaatggcaggacctgtcggagaaggtggtctaccggcgcttcaccgagatctacgagtttcatg

SEQ ID NO: 24100 - RNA, 87 nt, synthetic construct
  source 1..87: mol_type = other RNA
cccaggtatacatgttcctggtgaaatggcaggacctgtcggagaaggtggtctaccggcgcttcaccgagatctacgagttccatg

SEQ ID NO: 24101 - RNA, 87 nt, synthetic construct
  source 1..87: mol_type = other RNA
cccaggtatacatgttcctggtgaaatggcaggacctgtcggagaaggtggtctaccggcgcttcaccgagatctacgagtttcatg

SEQ ID NO: 24102 - RNA, 87 nt, synthetic construct
  source 1..87: mol_type = other RNA
cccaggtctacatgttcctggtgaaatggcaggacctgtcggagaaggtggtctaccggcgcttcaccgagatctacgagtttcatg

SEQ ID NO: 24103 - RNA, 87 nt, synthetic construct
  source 1..87: mol_type = other RNA
cccaggtctacatgttcctggtgaaatggcaggacctgtcggagaaggtggtctaccggcgcttcaccgagatctacgagttccatg

SEQ ID NO: 24104 - RNA, 87 nt, synthetic construct
  source 1..87: mol_type = other RNA
cccaggtttacatgttcctggtgaaatggcaggacctgtcggagaaggtggtctaccggcgcttcaccgagatctacgagtttcatg

SEQ ID NO: 24105 - RNA, 87 nt, synthetic construct
  source 1..87: mol_type = other RNA
cccaggtgtacatgttcctggtgaaatggcaggacctgtcggagaaggtggtctaccggcgcttcaccgagatctacgagttccatg

SEQ ID NO: 24106 - RNA, 88 nt, synthetic construct
  source 1..88: mol_type = other RNA
ccccaggtctacatgttcctggtgaaatggcaggacctgtcggagaaggtggtctaccggcgcttcaccgagatctacgagttccatg

SEQ ID NO: 24107 - RNA, 88 nt, synthetic construct
  source 1..88: mol_type = other RNA
ccccaggtatacatgttcctggtgaaatggcaggacctgtcggagaaggtggtctaccggcgcttcaccgagatctacgagtttcatg

SEQ ID NO: 24108 - RNA, 88 nt, synthetic construct
  source 1..88: mol_type = other RNA
ccccaggtgtacatgttcctggtgaaatggcaggacctgtcggagaaggtggtctaccggcgcttcaccgagatctacgagttccatg

SEQ ID NO: 24109 - RNA, 88 nt, synthetic construct
  source 1..88: mol_type = other RNA
ccccaggtctacatgttcctggtgaaatggcaggacctgtcggagaaggtggtctaccggcgcttcaccgagatctacgagtttcatg

SEQ ID NO: 24110 - RNA, 88 nt, synthetic construct
  source 1..88: mol_type = other RNA
ccccaggtttacatgttcctggtgaaatggcaggacctgtcggagaaggtggtctaccggcgcttcaccgagatctacgagttccatg

SEQ ID NO: 24111 - RNA, 88 nt, synthetic construct
  source 1..88: mol_type = other RNA
ccccaggtttacatgttcctggtgaaatggcaggacctgtcggagaaggtggtctaccggcgcttcaccgagatctacgagtttcatg

SEQ ID NO: 24112 - RNA, 88 nt, synthetic construct
  source 1..88: mol_type = other RNA
ccccaggtatacatgttcctggtgaaatggcaggacctgtcggagaaggtggtctaccggcgcttcaccgagatctacgagttccatg

SEQ ID NO: 24113 - RNA, 88 nt, synthetic construct
  source 1..88: mol_type = other RNA
ccccaggtgtacatgttcctggtgaaatggcaggacctgtcggagaaggtggtctaccggcgcttcaccgagatctacgagtttcatg

SEQ ID NO: 24114 - RNA, 89 nt, synthetic construct
  source 1..89: mol_type = other RNA
cccccaggtgtacatgttcctggtgaaatggcaggacctgtcggagaaggtggtctaccggcgcttcaccgagatctacgagtttcatg

SEQ ID NO: 24115 - RNA, 89 nt, synthetic construct
  source 1..89: mol_type = other RNA
cccccaggtttacatgttcctggtgaaatggcaggacctgtcggagaaggtggtctaccggcgcttcaccgagatctacgagttccatg

SEQ ID NO: 24116 - RNA, 89 nt, synthetic construct
  source 1..89: mol_type = other RNA
cccccaggtttacatgttcctggtgaaatggcaggacctgtcggagaaggtggtctaccggcgcttcaccgagatctacgagtttcatg

SEQ ID NO: 24117 - RNA, 89 nt, synthetic construct
  source 1..89: mol_type = other RNA
cccccaggtgtacatgttcctggtgaaatggcaggacctgtcggagaaggtggtctaccggcgcttcaccgagatctacgagttccatg

SEQ ID NO: 24118 - RNA, 89 nt, synthetic construct
  source 1..89: mol_type = other RNA
cccccaggtctacatgttcctggtgaaatggcaggacctgtcggagaaggtggtctaccggcgcttcaccgagatctacgagtttcatg

SEQ ID NO: 24119 - RNA, 89 nt, synthetic construct
  source 1..89: mol_type = other RNA
cccccaggtatacatgttcctggtgaaatggcaggacctgtcggagaaggtggtctaccggcgcttcaccgagatctacgagtttcatg

SEQ ID NO: 24120 - RNA, 89 nt, synthetic construct
  source 1..89: mol_type = other RNA
cccccaggtctacatgttcctggtgaaatggcaggacctgtcggagaaggtggtctaccggcgcttcaccgagatctacgagttccatg

SEQ ID NO: 24121 - RNA, 89 nt, synthetic construct
  source 1..89: mol_type = other RNA
cccccaggtatacatgttcctggtgaaatggcaggacctgtcggagaaggtggtctaccggcgcttcaccgagatctacgagttccatg

SEQ ID NO: 24122 - RNA, 90 nt, synthetic construct
  source 1..90: mol_type = other RNA
tcccccaggtatacatgttcctggtgaaatggcaggacctgtcggagaaggtggtctaccggcgcttcaccgagatctacgagttccatg

SEQ ID NO: 24123 - RNA, 90 nt, synthetic construct
  source 1..90: mol_type = other RNA
tcccccaggtatacatgttcctggtgaaatggcaggacctgtcggagaaggtggtctaccggcgcttcaccgagatctacgagtttcatg

SEQ ID NO: 24124 - RNA, 90 nt, synthetic construct
  source 1..90: mol_type = other RNA
tcccccaggtctacatgttcctggtgaaatggcaggacctgtcggagaaggtggtctaccggcgcttcaccgagatctacgagttccatg

SEQ ID NO: 24125 - RNA, 90 nt, synthetic construct
  source 1..90: mol_type = other RNA
tcccccaggtttacatgttcctggtgaaatggcaggacctgtcggagaaggtggtctaccggcgcttcaccgagatctacgagttccatg

SEQ ID NO: 24126 - RNA, 90 nt, synthetic construct
  source 1..90: mol_type = other RNA
tcccccaggtgtacatgttcctggtgaaatggcaggacctgtcggagaaggtggtctaccggcgcttcaccgagatctacgagtttcatg

SEQ ID NO: 24127 - RNA, 90 nt, synthetic construct
  source 1..90: mol_type = other RNA
tcccccaggtttacatgttcctggtgaaatggcaggacctgtcggagaaggtggtctaccggcgcttcaccgagatctacgagtttcatg

SEQ ID NO: 24128 - RNA, 90 nt, synthetic construct
  source 1..90: mol_type = other RNA
tcccccaggtctacatgttcctggtgaaatggcaggacctgtcggagaaggtggtctaccggcgcttcaccgagatctacgagtttcatg

SEQ ID NO: 24129 - RNA, 90 nt, synthetic construct
  source 1..90: mol_type = other RNA
tcccccaggtgtacatgttcctggtgaaatggcaggacctgtcggagaaggtggtctaccggcgcttcaccgagatctacgagttccatg

SEQ ID NO: 24130 - RNA, 91 nt, synthetic construct
  source 1..91: mol_type = other RNA
ttcccccaggtctacatgttcctggtgaaatggcaggacctgtcggagaaggtggtctaccggcgcttcaccgagatctacgagttccatg

SEQ ID NO: 24131 - RNA, 91 nt, synthetic construct
  source 1..91: mol_type = other RNA
ttcccccaggtatacatgttcctggtgaaatggcaggacctgtcggagaaggtggtctaccggcgcttcaccgagatctacgagtttcatg

SEQ ID NO: 24132 - RNA, 91 nt, synthetic construct
  source 1..91: mol_type = other RNA
ttcccccaggtctacatgttcctggtgaaatggcaggacctgtcggagaaggtggtctaccggcgcttcaccgagatctacgagtttcatg

SEQ ID NO: 24133 - RNA, 91 nt, synthetic construct
  source 1..91: mol_type = other RNA
ttcccccaggtatacatgttcctggtgaaatggcaggacctgtcggagaaggtggtctaccggcgcttcaccgagatctacgagttccatg

SEQ ID NO: 24134 - RNA, 91 nt, synthetic construct
  source 1..91: mol_type = other RNA
ttcccccaggtgtacatgttcctggtgaaatggcaggacctgtcggagaaggtggtctaccggcgcttcaccgagatctacgagttccatg

SEQ ID NO: 24135 - RNA, 91 nt, synthetic construct
  source 1..91: mol_type = other RNA
ttcccccaggtttacatgttcctggtgaaatggcaggacctgtcggagaaggtggtctaccggcgcttcaccgagatctacgagtttcatg

SEQ ID NO: 24136 - RNA, 91 nt, synthetic construct
  source 1..91: mol_type = other RNA
ttcccccaggtgtacatgttcctggtgaaatggcaggacctgtcggagaaggtggtctaccggcgcttcaccgagatctacgagtttcatg

SEQ ID NO: 24137 - RNA, 91 nt, synthetic construct
  source 1..91: mol_type = other RNA
ttcccccaggtttacatgttcctggtgaaatggcaggacctgtcggagaaggtggtctaccggcgcttcaccgagatctacgagttccatg

SEQ ID NO: 24138 - RNA, 92 nt, synthetic construct
  source 1..92: mol_type = other RNA
tttcccccaggtatacatgttcctggtgaaatggcaggacctgtcggagaaggtggtctaccggcgcttcaccgagatctacgagtttcatg

SEQ ID NO: 24139 - RNA, 92 nt, synthetic construct
  source 1..92: mol_type = other RNA
tttcccccaggtctacatgttcctggtgaaatggcaggacctgtcggagaaggtggtctaccggcgcttcaccgagatctacgagtttcatg

SEQ ID NO: 24140 - RNA, 92 nt, synthetic construct
  source 1..92: mol_type = other RNA
tttcccccaggtttacatgttcctggtgaaatggcaggacctgtcggagaaggtggtctaccggcgcttcaccgagatctacgagtttcatg

SEQ ID NO: 24141 - RNA, 92 nt, synthetic construct
  source 1..92: mol_type = other RNA
tttcccccaggtttacatgttcctggtgaaatggcaggacctgtcggagaaggtggtctaccggcgcttcaccgagatctacgagttccatg

SEQ ID NO: 24142 - RNA, 92 nt, synthetic construct
  source 1..92: mol_type = other RNA
tttcccccaggtgtacatgttcctggtgaaatggcaggacctgtcggagaaggtggtctaccggcgcttcaccgagatctacgagttccatg

SEQ ID NO: 24143 - RNA, 92 nt, synthetic construct
  source 1..92: mol_type = other RNA
tttcccccaggtgtacatgttcctggtgaaatggcaggacctgtcggagaaggtggtctaccggcgcttcaccgagatctacgagtttcatg

SEQ ID NO: 24144 - RNA, 92 nt, synthetic construct
  source 1..92: mol_type = other RNA
tttcccccaggtctacatgttcctggtgaaatggcaggacctgtcggagaaggtggtctaccggcgcttcaccgagatctacgagttccatg

SEQ ID NO: 24145 - RNA, 92 nt, synthetic construct
  source 1..92: mol_type = other RNA
tttcccccaggtatacatgttcctggtgaaatggcaggacctgtcggagaaggtggtctaccggcgcttcaccgagatctacgagttccatg

SEQ ID NO: 24146 - RNA, 93 nt, synthetic construct
  source 1..93: mol_type = other RNA
ctttcccccaggtatacatgttcctggtgaaatggcaggacctgtcggagaaggtggtctaccggcgcttcaccgagatctacgagtttcatg

SEQ ID NO: 24147 - RNA, 93 nt, synthetic construct
  source 1..93: mol_type = other RNA
ctttcccccaggtatacatgttcctggtgaaatggcaggacctgtcggagaaggtggtctaccggcgcttcaccgagatctacgagttccatg

SEQ ID NO: 24148 - RNA, 93 nt, synthetic construct
  source 1..93: mol_type = other RNA
ctttcccccaggtctacatgttcctggtgaaatggcaggacctgtcggagaaggtggtctaccggcgcttcaccgagatctacgagtttcatg

SEQ ID NO: 24149 - RNA, 93 nt, synthetic construct
  source 1..93: mol_type = other RNA
ctttcccccaggtctacatgttcctggtgaaatggcaggacctgtcggagaaggtggtctaccggcgcttcaccgagatctacgagttccatg

SEQ ID NO: 24150 - RNA, 93 nt, synthetic construct
  source 1..93: mol_type = other RNA
ctttcccccaggtgtacatgttcctggtgaaatggcaggacctgtcggagaaggtggtctaccggcgcttcaccgagatctacgagttccatg

SEQ ID NO: 24151 - RNA, 93 nt, synthetic construct
  source 1..93: mol_type = other RNA
ctttcccccaggtttacatgttcctggtgaaatggcaggacctgtcggagaaggtggtctaccggcgcttcaccgagatctacgagttccatg

SEQ ID NO: 24152 - RNA, 93 nt, synthetic construct
  source 1..93: mol_type = other RNA
ctttcccccaggtgtacatgttcctggtgaaatggcaggacctgtcggagaaggtggtctaccggcgcttcaccgagatctacgagtttcatg

SEQ ID NO: 24153 - RNA, 93 nt, synthetic construct
  source 1..93: mol_type = other RNA
ctttcccccaggtttacatgttcctggtgaaatggcaggacctgtcggagaaggtggtctaccggcgcttcaccgagatctacgagtttcatg

SEQ ID NO: 24154 - RNA, 94 nt, synthetic construct
  source 1..94: mol_type = other RNA
gctttcccccaggtttacatgttcctggtgaaatggcaggacctgtcggagaaggtggtctaccggcgcttcaccgagatctacgagttccatg

SEQ ID NO: 24155 - RNA, 94 nt, synthetic construct
  source 1..94: mol_type = other RNA
gctttcccccaggtctacatgttcctggtgaaatggcaggacctgtcggagaaggtggtctaccggcgcttcaccgagatctacgagttccatg

SEQ ID NO: 24156 - RNA, 94 nt, synthetic construct
  source 1..94: mol_type = other RNA
gctttcccccaggtgtacatgttcctggtgaaatggcaggacctgtcggagaaggtggtctaccggcgcttcaccgagatctacgagttccatg

SEQ ID NO: 24157 - RNA, 94 nt, synthetic construct
  source 1..94: mol_type = other RNA
gctttcccccaggtgtacatgttcctggtgaaatggcaggacctgtcggagaaggtggtctaccggcgcttcaccgagatctacgagtttcatg

SEQ ID NO: 24158 - RNA, 94 nt, synthetic construct
  source 1..94: mol_type = other RNA
gctttcccccaggtatacatgttcctggtgaaatggcaggacctgtcggagaaggtggtctaccggcgcttcaccgagatctacgagtttcatg

SEQ ID NO: 24159 - RNA, 94 nt, synthetic construct
  source 1..94: mol_type = other RNA
gctttcccccaggtttacatgttcctggtgaaatggcaggacctgtcggagaaggtggtctaccggcgcttcaccgagatctacgagtttcatg

SEQ ID NO: 24160 - RNA, 94 nt, synthetic construct
  source 1..94: mol_type = other RNA
gctttcccccaggtatacatgttcctggtgaaatggcaggacctgtcggagaaggtggtctaccggcgcttcaccgagatctacgagttccatg

SEQ ID NO: 24161 - RNA, 94 nt, synthetic construct
  source 1..94: mol_type = other RNA
gctttcccccaggtctacatgttcctggtgaaatggcaggacctgtcggagaaggtggtctaccggcgcttcaccgagatctacgagtttcatg

SEQ ID NO: 24162 - RNA, 95 nt, synthetic construct
  source 1..95: mol_type = other RNA
ggctttcccccaggtctacatgttcctggtgaaatggcaggacctgtcggagaaggtggtctaccggcgcttcaccgagatctacgagtttcatg

SEQ ID NO: 24163 - RNA, 95 nt, synthetic construct
  source 1..95: mol_type = other RNA
ggctttcccccaggtatacatgttcctggtgaaatggcaggacctgtcggagaaggtggtctaccggcgcttcaccgagatctacgagtttcatg

SEQ ID NO: 24164 - RNA, 95 nt, synthetic construct
  source 1..95: mol_type = other RNA
ggctttcccccaggtctacatgttcctggtgaaatggcaggacctgtcggagaaggtggtctaccggcgcttcaccgagatctacgagttccatg

SEQ ID NO: 24165 - RNA, 95 nt, synthetic construct
  source 1..95: mol_type = other RNA
ggctttcccccaggtgtacatgttcctggtgaaatggcaggacctgtcggagaaggtggtctaccggcgcttcaccgagatctacgagttccatg

SEQ ID NO: 24166 - RNA, 95 nt, synthetic construct
  source 1..95: mol_type = other RNA
ggctttcccccaggtgtacatgttcctggtgaaatggcaggacctgtcggagaaggtggtctaccggcgcttcaccgagatctacgagtttcatg

SEQ ID NO: 24167 - RNA, 95 nt, synthetic construct
  source 1..95: mol_type = other RNA
ggctttcccccaggtttacatgttcctggtgaaatggcaggacctgtcggagaaggtggtctaccggcgcttcaccgagatctacgagtttcatg

SEQ ID NO: 24168 - RNA, 95 nt, synthetic construct
  source 1..95: mol_type = other RNA
ggctttcccccaggtttacatgttcctggtgaaatggcaggacctgtcggagaaggtggtctaccggcgcttcaccgagatctacgagttccatg

SEQ ID NO: 24169 - RNA, 95 nt, synthetic construct
  source 1..95: mol_type = other RNA
ggctttcccccaggtatacatgttcctggtgaaatggcaggacctgtcggagaaggtggtctaccggcgcttcaccgagatctacgagttccatg

SEQ ID NO: 24170 - RNA, 96 nt, synthetic construct
  source 1..96: mol_type = other RNA
tggctttcccccaggtttacatgttcctggtgaaatggcaggacctgtcggagaaggtggtctaccggcgcttcaccgagatctacgagtttcatg

SEQ ID NO: 24171 - RNA, 96 nt, synthetic construct
  source 1..96: mol_type = other RNA
tggctttcccccaggtttacatgttcctggtgaaatggcaggacctgtcggagaaggtggtctaccggcgcttcaccgagatctacgagttccatg

SEQ ID NO: 24172 - RNA, 96 nt, synthetic construct
  source 1..96: mol_type = other RNA
tggctttcccccaggtgtacatgttcctggtgaaatggcaggacctgtcggagaaggtggtctaccggcgcttcaccgagatctacgagtttcatg

SEQ ID NO: 24173 - RNA, 96 nt, synthetic construct
  source 1..96: mol_type = other RNA
tggctttcccccaggtgtacatgttcctggtgaaatggcaggacctgtcggagaaggtggtctaccggcgcttcaccgagatctacgagttccatg

SEQ ID NO: 24174 - RNA, 96 nt, synthetic construct
  source 1..96: mol_type = other RNA
tggctttcccccaggtatacatgttcctggtgaaatggcaggacctgtcggagaaggtggtctaccggcgcttcaccgagatctacgagtttcatg

SEQ ID NO: 24175 - RNA, 96 nt, synthetic construct
  source 1..96: mol_type = other RNA
tggctttcccccaggtatacatgttcctggtgaaatggcaggacctgtcggagaaggtggtctaccggcgcttcaccgagatctacgagttccatg

SEQ ID NO: 24176 - RNA, 96 nt, synthetic construct
  source 1..96: mol_type = other RNA
tggctttcccccaggtctacatgttcctggtgaaatggcaggacctgtcggagaaggtggtctaccggcgcttcaccgagatctacgagtttcatg

SEQ ID NO: 24177 - RNA, 96 nt, synthetic construct
  source 1..96: mol_type = other RNA
tggctttcccccaggtctacatgttcctggtgaaatggcaggacctgtcggagaaggtggtctaccggcgcttcaccgagatctacgagttccatg

SEQ ID NO: 24178 - RNA, 97 nt, synthetic construct
  source 1..97: mol_type = other RNA
ctggctttcccccaggtgtacatgttcctggtgaaatggcaggacctgtcggagaaggtggtctaccggcgcttcaccgagatctacgagtttcatg

SEQ ID NO: 24179 - RNA, 97 nt, synthetic construct
  source 1..97: mol_type = other RNA
ctggctttcccccaggtctacatgttcctggtgaaatggcaggacctgtcggagaaggtggtctaccggcgcttcaccgagatctacgagttccatg

SEQ ID NO: 24180 - RNA, 97 nt, synthetic construct
  source 1..97: mol_type = other RNA
ctggctttcccccaggtatacatgttcctggtgaaatggcaggacctgtcggagaaggtggtctaccggcgcttcaccgagatctacgagttccatg

SEQ ID NO: 24181 - RNA, 97 nt, synthetic construct
  source 1..97: mol_type = other RNA
ctggctttcccccaggtatacatgttcctggtgaaatggcaggacctgtcggagaaggtggtctaccggcgcttcaccgagatctacgagtttcatg

SEQ ID NO: 24182 - RNA, 97 nt, synthetic construct
  source 1..97: mol_type = other RNA
ctggctttcccccaggtctacatgttcctggtgaaatggcaggacctgtcggagaaggtggtctaccggcgcttcaccgagatctacgagtttcatg

SEQ ID NO: 24183 - RNA, 97 nt, synthetic construct
  source 1..97: mol_type = other RNA
ctggctttcccccaggtttacatgttcctggtgaaatggcaggacctgtcggagaaggtggtctaccggcgcttcaccgagatctacgagttccatg

SEQ ID NO: 24184 - RNA, 97 nt, synthetic construct
  source 1..97: mol_type = other RNA
ctggctttcccccaggtttacatgttcctggtgaaatggcaggacctgtcggagaaggtggtctaccggcgcttcaccgagatctacgagtttcatg

SEQ ID NO: 24185 - RNA, 97 nt, synthetic construct
  source 1..97: mol_type = other RNA
ctggctttcccccaggtgtacatgttcctggtgaaatggcaggacctgtcggagaaggtggtctaccggcgcttcaccgagatctacgagttccatg

SEQ ID NO: 24186 - RNA, 98 nt, synthetic construct
  source 1..98: mol_type = other RNA
tctggctttcccccaggtttacatgttcctggtgaaatggcaggacctgtcggagaaggtggtctaccggcgcttcaccgagatctacgagtttcatg

SEQ ID NO: 24187 - RNA, 98 nt, synthetic construct
  source 1..98: mol_type = other RNA
tctggctttcccccaggtgtacatgttcctggtgaaatggcaggacctgtcggagaaggtggtctaccggcgcttcaccgagatctacgagtttcatg

SEQ ID NO: 24188 - RNA, 98 nt, synthetic construct
  source 1..98: mol_type = other RNA
tctggctttcccccaggtatacatgttcctggtgaaatggcaggacctgtcggagaaggtggtctaccggcgcttcaccgagatctacgagttccatg

SEQ ID NO: 24189 - RNA, 98 nt, synthetic construct
  source 1..98: mol_type = other RNA
tctggctttcccccaggtatacatgttcctggtgaaatggcaggacctgtcggagaaggtggtctaccggcgcttcaccgagatctacgagtttcatg

SEQ ID NO: 24190 - RNA, 98 nt, synthetic construct
  source 1..98: mol_type = other RNA
tctggctttcccccaggtctacatgttcctggtgaaatggcaggacctgtcggagaaggtggtctaccggcgcttcaccgagatctacgagtttcatg

SEQ ID NO: 24191 - RNA, 98 nt, synthetic construct
  source 1..98: mol_type = other RNA
tctggctttcccccaggtgtacatgttcctggtgaaatggcaggacctgtcggagaaggtggtctaccggcgcttcaccgagatctacgagttccatg

SEQ ID NO: 24192 - RNA, 98 nt, synthetic construct
  source 1..98: mol_type = other RNA
tctggctttcccccaggtttacatgttcctggtgaaatggcaggacctgtcggagaaggtggtctaccggcgcttcaccgagatctacgagttccatg

SEQ ID NO: 24193 - RNA, 98 nt, synthetic construct
  source 1..98: mol_type = other RNA
tctggctttcccccaggtctacatgttcctggtgaaatggcaggacctgtcggagaaggtggtctaccggcgcttcaccgagatctacgagttccatg

SEQ ID NO: 24194 - RNA, 99 nt, synthetic construct
  source 1..99: mol_type = other RNA
ctctggctttcccccaggtttacatgttcctggtgaaatggcaggacctgtcggagaaggtggtctaccggcgcttcaccgagatctacgagttccatg

SEQ ID NO: 24195 - RNA, 99 nt, synthetic construct
  source 1..99: mol_type = other RNA
ctctggctttcccccaggtctacatgttcctggtgaaatggcaggacctgtcggagaaggtggtctaccggcgcttcaccgagatctacgagtttcatg

SEQ ID NO: 24196 - RNA, 99 nt, synthetic construct
  source 1..99: mol_type = other RNA
ctctggctttcccccaggtctacatgttcctggtgaaatggcaggacctgtcggagaaggtggtctaccggcgcttcaccgagatctacgagttccatg

SEQ ID NO: 24197 - RNA, 99 nt, synthetic construct
  source 1..99: mol_type = other RNA
ctctggctttcccccaggtttacatgttcctggtgaaatggcaggacctgtcggagaaggtggtctaccggcgcttcaccgagatctacgagtttcatg

SEQ ID NO: 24198 - RNA, 99 nt, synthetic construct
  source 1..99: mol_type = other RNA
ctctggctttcccccaggtgtacatgttcctggtgaaatggcaggacctgtcggagaaggtggtctaccggcgcttcaccgagatctacgagttccatg

SEQ ID NO: 24199 - RNA, 99 nt, synthetic construct
  source 1..99: mol_type = other RNA
ctctggctttcccccaggtatacatgttcctggtgaaatggcaggacctgtcggagaaggtggtctaccggcgcttcaccgagatctacgagtttcatg

SEQ ID NO: 24200 - RNA, 99 nt, synthetic construct
  source 1..99: mol_type = other RNA
ctctggctttcccccaggtgtacatgttcctggtgaaatggcaggacctgtcggagaaggtggtctaccggcgcttcaccgagatctacgagtttcatg

SEQ ID NO: 24201 - RNA, 99 nt, synthetic construct
  source 1..99: mol_type = other RNA
ctctggctttcccccaggtatacatgttcctggtgaaatggcaggacctgtcggagaaggtggtctaccggcgcttcaccgagatctacgagttccatg

SEQ ID NO: 24202 - RNA, 100 nt, synthetic construct
  source 1..100: mol_type = other RNA
actctggctttcccccaggtgtacatgttcctggtgaaatggcaggacctgtcggagaaggtggtctaccggcgcttcaccgagatctacgagtttcatg

SEQ ID NO: 24203 - RNA, 100 nt, synthetic construct
  source 1..100: mol_type = other RNA
actctggctttcccccaggtttacatgttcctggtgaaatggcaggacctgtcggagaaggtggtctaccggcgcttcaccgagatctacgagttccatg

SEQ ID NO: 24204 - RNA, 100 nt, synthetic construct
  source 1..100: mol_type = other RNA
actctggctttcccccaggtttacatgttcctggtgaaatggcaggacctgtcggagaaggtggtctaccggcgcttcaccgagatctacgagtttcatg

SEQ ID NO: 24205 - RNA, 100 nt, synthetic construct
  source 1..100: mol_type = other RNA
actctggctttcccccaggtgtacatgttcctggtgaaatggcaggacctgtcggagaaggtggtctaccggcgcttcaccgagatctacgagttccatg

SEQ ID NO: 24206 - RNA, 100 nt, synthetic construct
  source 1..100: mol_type = other RNA
actctggctttcccccaggtctacatgttcctggtgaaatggcaggacctgtcggagaaggtggtctaccggcgcttcaccgagatctacgagtttcatg

SEQ ID NO: 24207 - RNA, 100 nt, synthetic construct
  source 1..100: mol_type = other RNA
actctggctttcccccaggtctacatgttcctggtgaaatggcaggacctgtcggagaaggtggtctaccggcgcttcaccgagatctacgagttccatg

SEQ ID NO: 24208 - RNA, 100 nt, synthetic construct
  source 1..100: mol_type = other RNA
actctggctttcccccaggtatacatgttcctggtgaaatggcaggacctgtcggagaaggtggtctaccggcgcttcaccgagatctacgagtttcatg

SEQ ID NO: 24209 - RNA, 100 nt, synthetic construct
  source 1..100: mol_type = other RNA
actctggctttcccccaggtatacatgttcctggtgaaatggcaggacctgtcggagaaggtggtctaccggcgcttcaccgagatctacgagttccatg

SEQ ID NO: 24210 - RNA, 101 nt, synthetic construct
  source 1..101: mol_type = other RNA
gactctggctttcccccaggtatacatgttcctggtgaaatggcaggacctgtcggagaaggtggtctaccggcgcttcaccgagatctacgagtttcatg

SEQ ID NO: 24211 - RNA, 101 nt, synthetic construct
  source 1..101: mol_type = other RNA
gactctggctttcccccaggtctacatgttcctggtgaaatggcaggacctgtcggagaaggtggtctaccggcgcttcaccgagatctacgagtttcatg

SEQ ID NO: 24212 - RNA, 101 nt, synthetic construct
  source 1..101: mol_type = other RNA
gactctggctttcccccaggtatacatgttcctggtgaaatggcaggacctgtcggagaaggtggtctaccggcgcttcaccgagatctacgagttccatg

SEQ ID NO: 24213 - RNA, 101 nt, synthetic construct
  source 1..101: mol_type = other RNA
gactctggctttcccccaggtctacatgttcctggtgaaatggcaggacctgtcggagaaggtggtctaccggcgcttcaccgagatctacgagttccatg

SEQ ID NO: 24214 - RNA, 101 nt, synthetic construct
  source 1..101: mol_type = other RNA
gactctggctttcccccaggtttacatgttcctggtgaaatggcaggacctgtcggagaaggtggtctaccggcgcttcaccgagatctacgagttccatg

SEQ ID NO: 24215 - RNA, 101 nt, synthetic construct
  source 1..101: mol_type = other RNA
gactctggctttcccccaggtgtacatgttcctggtgaaatggcaggacctgtcggagaaggtggtctaccggcgcttcaccgagatctacgagttccatg

SEQ ID NO: 24216 - RNA, 101 nt, synthetic construct
  source 1..101: mol_type = other RNA
gactctggctttcccccaggtgtacatgttcctggtgaaatggcaggacctgtcggagaaggtggtctaccggcgcttcaccgagatctacgagtttcatg

SEQ ID NO: 24217 - RNA, 101 nt, synthetic construct
  source 1..101: mol_type = other RNA
gactctggctttcccccaggtttacatgttcctggtgaaatggcaggacctgtcggagaaggtggtctaccggcgcttcaccgagatctacgagtttcatg

SEQ ID NO: 24218 - RNA, 102 nt, synthetic construct
  source 1..102: mol_type = other RNA
cgactctggctttcccccaggtatacatgttcctggtgaaatggcaggacctgtcggagaaggtggtctaccggcgcttcaccgagatctacgagttccatg

SEQ ID NO: 24219 - RNA, 102 nt, synthetic construct
  source 1..102: mol_type = other RNA
cgactctggctttcccccaggtgtacatgttcctggtgaaatggcaggacctgtcggagaaggtggtctaccggcgcttcaccgagatctacgagtttcatg

SEQ ID NO: 24220 - RNA, 102 nt, synthetic construct
  source 1..102: mol_type = other RNA
cgactctggctttcccccaggtctacatgttcctggtgaaatggcaggacctgtcggagaaggtggtctaccggcgcttcaccgagatctacgagttccatg

SEQ ID NO: 24221 - RNA, 102 nt, synthetic construct
  source 1..102: mol_type = other RNA
cgactctggctttcccccaggtatacatgttcctggtgaaatggcaggacctgtcggagaaggtggtctaccggcgcttcaccgagatctacgagtttcatg

SEQ ID NO: 24222 - RNA, 102 nt, synthetic construct
  source 1..102: mol_type = other RNA
cgactctggctttcccccaggtctacatgttcctggtgaaatggcaggacctgtcggagaaggtggtctaccggcgcttcaccgagatctacgagtttcatg

SEQ ID NO: 24223 - RNA, 102 nt, synthetic construct
  source 1..102: mol_type = other RNA
cgactctggctttcccccaggtttacatgttcctggtgaaatggcaggacctgtcggagaaggtggtctaccggcgcttcaccgagatctacgagttccatg

SEQ ID NO: 24224 - RNA, 102 nt, synthetic construct
  source 1..102: mol_type = other RNA
cgactctggctttcccccaggtttacatgttcctggtgaaatggcaggacctgtcggagaaggtggtctaccggcgcttcaccgagatctacgagtttcatg

SEQ ID NO: 24225 - RNA, 102 nt, synthetic construct
  source 1..102: mol_type = other RNA
cgactctggctttcccccaggtgtacatgttcctggtgaaatggcaggacctgtcggagaaggtggtctaccggcgcttcaccgagatctacgagttccatg

SEQ ID NO: 24226 - RNA, 103 nt, synthetic construct
  source 1..103: mol_type = other RNA
ccgactctggctttcccccaggtatacatgttcctggtgaaatggcaggacctgtcggagaaggtggtctaccggcgcttcaccgagatctacgagtttcatg

SEQ ID NO: 24227 - RNA, 103 nt, synthetic construct
  source 1..103: mol_type = other RNA
ccgactctggctttcccccaggtatacatgttcctggtgaaatggcaggacctgtcggagaaggtggtctaccggcgcttcaccgagatctacgagttccatg

SEQ ID NO: 24228 - RNA, 103 nt, synthetic construct
  source 1..103: mol_type = other RNA
ccgactctggctttcccccaggtttacatgttcctggtgaaatggcaggacctgtcggagaaggtggtctaccggcgcttcaccgagatctacgagtttcatg

SEQ ID NO: 24229 - RNA, 103 nt, synthetic construct
  source 1..103: mol_type = other RNA
ccgactctggctttcccccaggtctacatgttcctggtgaaatggcaggacctgtcggagaaggtggtctaccggcgcttcaccgagatctacgagtttcatg

SEQ ID NO: 24230 - RNA, 103 nt, synthetic construct
  source 1..103: mol_type = other RNA
ccgactctggctttcccccaggtgtacatgttcctggtgaaatggcaggacctgtcggagaaggtggtctaccggcgcttcaccgagatctacgagttccatg

SEQ ID NO: 24231 - RNA, 103 nt, synthetic construct
  source 1..103: mol_type = other RNA
ccgactctggctttcccccaggtgtacatgttcctggtgaaatggcaggacctgtcggagaaggtggtctaccggcgcttcaccgagatctacgagtttcatg

SEQ ID NO: 24232 - RNA, 103 nt, synthetic construct
  source 1..103: mol_type = other RNA
ccgactctggctttcccccaggtctacatgttcctggtgaaatggcaggacctgtcggagaaggtggtctaccggcgcttcaccgagatctacgagttccatg

SEQ ID NO: 24233 - RNA, 103 nt, synthetic construct
  source 1..103: mol_type = other RNA
ccgactctggctttcccccaggtttacatgttcctggtgaaatggcaggacctgtcggagaaggtggtctaccggcgcttcaccgagatctacgagttccatg

SEQ ID NO: 24234 - RNA, 20 nt, synthetic construct
  source 1..20: mol_type = other RNA
cgagatctacgagtttcatg

SEQ ID NO: 24235 - RNA, 20 nt, synthetic construct
  source 1..20: mol_type = other RNA
accgagatctacgagtttca

SEQ ID NO: 24236 - RNA, 20 nt, synthetic construct
  source 1..20: mol_type = other RNA
agatctacgagtttcatgtg

SEQ ID NO: 24237 - RNA, 16 nt, synthetic construct
  source 1..16: mol_type = other RNA
ggggtcccccgactct

SEQ ID NO: 24238 - RNA, 17 nt, synthetic construct
  source 1..17: mol_type = other RNA
tggggtcccccgactct

SEQ ID NO: 24239 - RNA, 18 nt, synthetic construct
  source 1..18: mol_type = other RNA
atggggtcccccgactct

SEQ ID NO: 24240 - RNA, 19 nt, synthetic construct
  source 1..19: mol_type = other RNA
aatggggtcccccgactct

SEQ ID NO: 24241 - RNA, 20 nt, synthetic construct
  source 1..20: mol_type = other RNA
gaatggggtcccccgactct

SEQ ID NO: 24242 - RNA, 21 nt, synthetic construct
  source 1..21: mol_type = other RNA
tgaatggggtcccccgactct

SEQ ID NO: 24243 - RNA, 22 nt, synthetic construct
  source 1..22: mol_type = other RNA
ctgaatggggtcccccgactct

SEQ ID NO: 24244-24250 - skipped (7 entries)

SEQ ID NO: 24251 - RNA, 10 nt, synthetic construct
  source 1..10: mol_type = other RNA
gtcgggggac

SEQ ID NO: 24252 - RNA, 11 nt, synthetic construct
  source 1..11: mol_type = other RNA
gtcgggggacc

SEQ ID NO: 24253 - RNA, 12 nt, synthetic construct
  source 1..12: mol_type = other RNA
gtcgggggaccc

SEQ ID NO: 24254 - RNA, 13 nt, synthetic construct
  source 1..13: mol_type = other RNA
gtcgggggacccc

SEQ ID NO: 24255 - RNA, 14 nt, synthetic construct
  source 1..14: mol_type = other RNA
gtcgggggacccca

SEQ ID NO: 24256 - RNA, 15 nt, synthetic construct
  source 1..15: mol_type = other RNA
gtcgggggaccccat

SEQ ID NO: 24257 - RNA, 16 nt, synthetic construct
  source 1..16: mol_type = other RNA
gtcgggggaccccatt

SEQ ID NO: 24258 - RNA, 17 nt, synthetic construct
  source 1..17: mol_type = other RNA
gtcgggggaccccattc

SEQ ID NO: 24259 - RNA, 18 nt, synthetic construct
  source 1..18: mol_type = other RNA
gtcgggggaccccattca

SEQ ID NO: 24260 - RNA, 19 nt, synthetic construct
  source 1..19: mol_type = other RNA
gtcgggggaccccattcag

SEQ ID NO: 24261 - RNA, 18 nt, synthetic construct
  source 1..18: mol_type = other RNA
acctgggggaaagccaga

SEQ ID NO: 24262 - RNA, 19 nt, synthetic construct
  source 1..19: mol_type = other RNA
aacctgggggaaagccaga

SEQ ID NO: 24263 - RNA, 19 nt, synthetic construct
  source 1..19: mol_type = other RNA
tacctgggggaaagccaga

SEQ ID NO: 24264 - RNA, 19 nt, synthetic construct
  source 1..19: mol_type = other RNA
gacctgggggaaagccaga

SEQ ID NO: 24265 - RNA, 19 nt, synthetic construct
  source 1..19: mol_type = other RNA
cacctgggggaaagccaga

SEQ ID NO: 24266 - RNA, 20 nt, synthetic construct
  source 1..20: mol_type = other RNA
atacctgggggaaagccaga

SEQ ID NO: 24267 - RNA, 20 nt, synthetic construct
  source 1..20: mol_type = other RNA
aaacctgggggaaagccaga

SEQ ID NO: 24268 - RNA, 20 nt, synthetic construct
  source 1..20: mol_type = other RNA
agacctgggggaaagccaga

SEQ ID NO: 24269 - RNA, 20 nt, synthetic construct
  source 1..20: mol_type = other RNA
acacctgggggaaagccaga

SEQ ID NO: 24270 - RNA, 21 nt, synthetic construct
  source 1..21: mol_type = other RNA
tatacctgggggaaagccaga

SEQ ID NO: 24271 - RNA, 21 nt, synthetic construct
  source 1..21: mol_type = other RNA
tagacctgggggaaagccaga

SEQ ID NO: 24272 - RNA, 21 nt, synthetic construct
  source 1..21: mol_type = other RNA
tacacctgggggaaagccaga

SEQ ID NO: 24273 - RNA, 21 nt, synthetic construct
  source 1..21: mol_type = other RNA
taaacctgggggaaagccaga

SEQ ID NO: 24274 - RNA, 22 nt, synthetic construct
  source 1..22: mol_type = other RNA
gtagacctgggggaaagccaga

SEQ ID NO: 24275 - RNA, 22 nt, synthetic construct
  source 1..22: mol_type = other RNA
gtatacctgggggaaagccaga

SEQ ID NO: 24276 - RNA, 22 nt, synthetic construct
  source 1..22: mol_type = other RNA
gtaaacctgggggaaagccaga

SEQ ID NO: 24277 - RNA, 22 nt, synthetic construct
  source 1..22: mol_type = other RNA
gtacacctgggggaaagccaga

SEQ ID NO: 24278 - RNA, 23 nt, synthetic construct
  source 1..23: mol_type = other RNA
tgtaaacctgggggaaagccaga

SEQ ID NO: 24279 - RNA, 23 nt, synthetic construct
  source 1..23: mol_type = other RNA
tgtacacctgggggaaagccaga

SEQ ID NO: 24280 - RNA, 23 nt, synthetic construct
  source 1..23: mol_type = other RNA
tgtagacctgggggaaagccaga

SEQ ID NO: 24281 - RNA, 23 nt, synthetic construct
  source 1..23: mol_type = other RNA
tgtatacctgggggaaagccaga

SEQ ID NO: 24282 - RNA, 24 nt, synthetic construct
  source 1..24: mol_type = other RNA
atgtagacctgggggaaagccaga

SEQ ID NO: 24283 - RNA, 24 nt, synthetic construct
  source 1..24: mol_type = other RNA
atgtacacctgggggaaagccaga

SEQ ID NO: 24284 - RNA, 24 nt, synthetic construct
  source 1..24: mol_type = other RNA
atgtaaacctgggggaaagccaga

SEQ ID NO: 24285 - RNA, 24 nt, synthetic construct
  source 1..24: mol_type = other RNA
atgtatacctgggggaaagccaga

SEQ ID NO: 24286 - RNA, 25 nt, synthetic construct
  source 1..25: mol_type = other RNA
catgtaaacctgggggaaagccaga

SEQ ID NO: 24287 - RNA, 25 nt, synthetic construct
  source 1..25: mol_type = other RNA
catgtagacctgggggaaagccaga

SEQ ID NO: 24288 - RNA, 25 nt, synthetic construct
  source 1..25: mol_type = other RNA
catgtatacctgggggaaagccaga

SEQ ID NO: 24289 - RNA, 25 nt, synthetic construct
  source 1..25: mol_type = other RNA
catgtacacctgggggaaagccaga

SEQ ID NO: 24290 - RNA, 26 nt, synthetic construct
  source 1..26: mol_type = other RNA
acatgtagacctgggggaaagccaga

SEQ ID NO: 24291 - RNA, 26 nt, synthetic construct
  source 1..26: mol_type = other RNA
acatgtatacctgggggaaagccaga

SEQ ID NO: 24292 - RNA, 26 nt, synthetic construct
  source 1..26: mol_type = other RNA
acatgtaaacctgggggaaagccaga

SEQ ID NO: 24293 - RNA, 26 nt, synthetic construct
  source 1..26: mol_type = other RNA
acatgtacacctgggggaaagccaga

SEQ ID NO: 24294 - RNA, 27 nt, synthetic construct
  source 1..27: mol_type = other RNA
aacatgtatacctgggggaaagccaga

SEQ ID NO: 24295 - RNA, 27 nt, synthetic construct
  source 1..27: mol_type = other RNA
aacatgtagacctgggggaaagccaga

SEQ ID NO: 24296 - RNA, 27 nt, synthetic construct
  source 1..27: mol_type = other RNA
aacatgtacacctgggggaaagccaga

SEQ ID NO: 24297 - RNA, 27 nt, synthetic construct
  source 1..27: mol_type = other RNA
aacatgtaaacctgggggaaagccaga

SEQ ID NO: 24298 - RNA, 28 nt, synthetic construct
  source 1..28: mol_type = other RNA
gaacatgtagacctgggggaaagccaga

SEQ ID NO: 24299 - RNA, 28 nt, synthetic construct
  source 1..28: mol_type = other RNA
gaacatgtaaacctgggggaaagccaga

SEQ ID NO: 24300 - RNA, 28 nt, synthetic construct
  source 1..28: mol_type = other RNA
gaacatgtacacctgggggaaagccaga

SEQ ID NO: 24301 - RNA, 28 nt, synthetic construct
  source 1..28: mol_type = other RNA
gaacatgtatacctgggggaaagccaga

SEQ ID NO: 24302 - RNA, 29 nt, synthetic construct
  source 1..29: mol_type = other RNA
ggaacatgtaaacctgggggaaagccaga

SEQ ID NO: 24303 - RNA, 29 nt, synthetic construct
  source 1..29: mol_type = other RNA
ggaacatgtacacctgggggaaagccaga

SEQ ID NO: 24304 - RNA, 29 nt, synthetic construct
  source 1..29: mol_type = other RNA
ggaacatgtagacctgggggaaagccaga

SEQ ID NO: 24305 - RNA, 29 nt, synthetic construct
  source 1..29: mol_type = other RNA
ggaacatgtatacctgggggaaagccaga

SEQ ID NO: 24306 - RNA, 30 nt, synthetic construct
  source 1..30: mol_type = other RNA
aggaacatgtaaacctgggggaaagccaga

SEQ ID NO: 24307 - RNA, 30 nt, synthetic construct
  source 1..30: mol_type = other RNA
aggaacatgtagacctgggggaaagccaga

SEQ ID NO: 24308 - RNA, 30 nt, synthetic construct
  source 1..30: mol_type = other RNA
aggaacatgtatacctgggggaaagccaga

SEQ ID NO: 24309 - RNA, 30 nt, synthetic construct
  source 1..30: mol_type = other RNA
aggaacatgtacacctgggggaaagccaga

SEQ ID NO: 24310 - RNA, 31 nt, synthetic construct
  source 1..31: mol_type = other RNA
caggaacatgtagacctgggggaaagccaga

SEQ ID NO: 24311 - RNA, 31 nt, synthetic construct
  source 1..31: mol_type = other RNA
caggaacatgtatacctgggggaaagccaga

SEQ ID NO: 24312 - RNA, 31 nt, synthetic construct
  source 1..31: mol_type = other RNA
caggaacatgtaaacctgggggaaagccaga

SEQ ID NO: 24313 - RNA, 31 nt, synthetic construct
  source 1..31: mol_type = other RNA
caggaacatgtacacctgggggaaagccaga

SEQ ID NO: 24314 - RNA, 32 nt, synthetic construct
  source 1..32: mol_type = other RNA
ccaggaacatgtaaacctgggggaaagccaga

SEQ ID NO: 24315 - RNA, 32 nt, synthetic construct
  source 1..32: mol_type = other RNA
ccaggaacatgtatacctgggggaaagccaga

SEQ ID NO: 24316 - RNA, 32 nt, synthetic construct
  source 1..32: mol_type = other RNA
ccaggaacatgtagacctgggggaaagccaga

SEQ ID NO: 24317 - RNA, 32 nt, synthetic construct
  source 1..32: mol_type = other RNA
ccaggaacatgtacacctgggggaaagccaga

SEQ ID NO: 24318 - RNA, 33 nt, synthetic construct
  source 1..33: mol_type = other RNA
accaggaacatgtacacctgggggaaagccaga

SEQ ID NO: 24319 - RNA, 33 nt, synthetic construct
  source 1..33: mol_type = other RNA
accaggaacatgtagacctgggggaaagccaga

SEQ ID NO: 24320 - RNA, 33 nt, synthetic construct
  source 1..33: mol_type = other RNA
accaggaacatgtatacctgggggaaagccaga

SEQ ID NO: 24321 - RNA, 33 nt, synthetic construct
  source 1..33: mol_type = other RNA
accaggaacatgtaaacctgggggaaagccaga

SEQ ID NO: 24322 - RNA, 34 nt, synthetic construct
  source 1..34: mol_type = other RNA
caccaggaacatgtaaacctgggggaaagccaga

SEQ ID NO: 24323 - RNA, 34 nt, synthetic construct
  source 1..34: mol_type = other RNA
caccaggaacatgtacacctgggggaaagccaga

SEQ ID NO: 24324 - RNA, 34 nt, synthetic construct
  source 1..34: mol_type = other RNA
caccaggaacatgtagacctgggggaaagccaga

SEQ ID NO: 24325 - RNA, 34 nt, synthetic construct
  source 1..34: mol_type = other RNA
caccaggaacatgtatacctgggggaaagccaga

SEQ ID NO: 24326 - RNA, 35 nt, synthetic construct
  source 1..35: mol_type = other RNA
tcaccaggaacatgtaaacctgggggaaagccaga

SEQ ID NO: 24327 - RNA, 35 nt, synthetic construct
  source 1..35: mol_type = other RNA
tcaccaggaacatgtagacctgggggaaagccaga

SEQ ID NO: 24328 - RNA, 35 nt, synthetic construct
  source 1..35: mol_type = other RNA
tcaccaggaacatgtatacctgggggaaagccaga

SEQ ID NO: 24329 - RNA, 35 nt, synthetic construct
  source 1..35: mol_type = other RNA
tcaccaggaacatgtacacctgggggaaagccaga

SEQ ID NO: 24330 - RNA, 36 nt, synthetic construct
  source 1..36: mol_type = other RNA
ttcaccaggaacatgtaaacctgggggaaagccaga

SEQ ID NO: 24331 - RNA, 36 nt, synthetic construct
  source 1..36: mol_type = other RNA
ttcaccaggaacatgtagacctgggggaaagccaga

SEQ ID NO: 24332 - RNA, 36 nt, synthetic construct
  source 1..36: mol_type = other RNA
ttcaccaggaacatgtacacctgggggaaagccaga

SEQ ID NO: 24333 - RNA, 36 nt, synthetic construct
  source 1..36: mol_type = other RNA
ttcaccaggaacatgtatacctgggggaaagccaga

SEQ ID NO: 24334 - RNA, 37 nt, synthetic construct
  source 1..37: mol_type = other RNA
tttcaccaggaacatgtatacctgggggaaagccaga

SEQ ID NO: 24335 - RNA, 37 nt, synthetic construct
  source 1..37: mol_type = other RNA
tttcaccaggaacatgtagacctgggggaaagccaga

SEQ ID NO: 24336 - RNA, 37 nt, synthetic construct
  source 1..37: mol_type = other RNA
tttcaccaggaacatgtacacctgggggaaagccaga

SEQ ID NO: 24337 - RNA, 37 nt, synthetic construct
  source 1..37: mol_type = other RNA
tttcaccaggaacatgtaaacctgggggaaagccaga

SEQ ID NO: 24338 - RNA, 38 nt, synthetic construct
  source 1..38: mol_type = other RNA
atttcaccaggaacatgtacacctgggggaaagccaga

SEQ ID NO: 24339 - RNA, 38 nt, synthetic construct
  source 1..38: mol_type = other RNA
atttcaccaggaacatgtagacctgggggaaagccaga

SEQ ID NO: 24340 - RNA, 38 nt, synthetic construct
  source 1..38: mol_type = other RNA
atttcaccaggaacatgtaaacctgggggaaagccaga

SEQ ID NO: 24341 - RNA, 38 nt, synthetic construct
  source 1..38: mol_type = other RNA
atttcaccaggaacatgtatacctgggggaaagccaga

SEQ ID NO: 24342 - RNA, 39 nt, synthetic construct
  source 1..39: mol_type = other RNA
catttcaccaggaacatgtatacctgggggaaagccaga

SEQ ID NO: 24343 - RNA, 39 nt, synthetic construct
  source 1..39: mol_type = other RNA
catttcaccaggaacatgtaaacctgggggaaagccaga

SEQ ID NO: 24344 - RNA, 39 nt, synthetic construct
  source 1..39: mol_type = other RNA
catttcaccaggaacatgtagacctgggggaaagccaga

SEQ ID NO: 24345 - RNA, 39 nt, synthetic construct
  source 1..39: mol_type = other RNA
catttcaccaggaacatgtacacctgggggaaagccaga

SEQ ID NO: 24346 - RNA, 40 nt, synthetic construct
  source 1..40: mol_type = other RNA
ccatttcaccaggaacatgtacacctgggggaaagccaga

SEQ ID NO: 24347 - RNA, 40 nt, synthetic construct
  source 1..40: mol_type = other RNA
ccatttcaccaggaacatgtagacctgggggaaagccaga

SEQ ID NO: 24348 - RNA, 40 nt, synthetic construct
  source 1..40: mol_type = other RNA
ccatttcaccaggaacatgtatacctgggggaaagccaga

SEQ ID NO: 24349 - RNA, 40 nt, synthetic construct
  source 1..40: mol_type = other RNA
ccatttcaccaggaacatgtaaacctgggggaaagccaga

SEQ ID NO: 24350 - RNA, 41 nt, synthetic construct
  source 1..41: mol_type = other RNA
gccatttcaccaggaacatgtaaacctgggggaaagccaga

SEQ ID NO: 24351 - RNA, 41 nt, synthetic construct
  source 1..41: mol_type = other RNA
gccatttcaccaggaacatgtacacctgggggaaagccaga

SEQ ID NO: 24352 - RNA, 41 nt, synthetic construct
  source 1..41: mol_type = other RNA
gccatttcaccaggaacatgtatacctgggggaaagccaga

SEQ ID NO: 24353 - RNA, 41 nt, synthetic construct
  source 1..41: mol_type = other RNA
gccatttcaccaggaacatgtagacctgggggaaagccaga

SEQ ID NO: 24354 - RNA, 42 nt, synthetic construct
  source 1..42: mol_type = other RNA
tgccatttcaccaggaacatgtacacctgggggaaagccaga

SEQ ID NO: 24355 - RNA, 42 nt, synthetic construct
  source 1..42: mol_type = other RNA
tgccatttcaccaggaacatgtaaacctgggggaaagccaga

SEQ ID NO: 24356 - RNA, 42 nt, synthetic construct
  source 1..42: mol_type = other RNA
tgccatttcaccaggaacatgtatacctgggggaaagccaga

SEQ ID NO: 24357 - RNA, 42 nt, synthetic construct
  source 1..42: mol_type = other RNA
tgccatttcaccaggaacatgtagacctgggggaaagccaga

SEQ ID NO: 24358 - RNA, 43 nt, synthetic construct
  source 1..43: mol_type = other RNA
ctgccatttcaccaggaacatgtatacctgggggaaagccaga

SEQ ID NO: 24359 - RNA, 43 nt, synthetic construct
  source 1..43: mol_type = other RNA
ctgccatttcaccaggaacatgtaaacctgggggaaagccaga

SEQ ID NO: 24360 - RNA, 43 nt, synthetic construct
  source 1..43: mol_type = other RNA
ctgccatttcaccaggaacatgtacacctgggggaaagccaga

SEQ ID NO: 24361 - RNA, 43 nt, synthetic construct
  source 1..43: mol_type = other RNA
ctgccatttcaccaggaacatgtagacctgggggaaagccaga

SEQ ID NO: 24362 - RNA, 44 nt, synthetic construct
  source 1..44: mol_type = other RNA
cctgccatttcaccaggaacatgtatacctgggggaaagccaga

SEQ ID NO: 24363 - RNA, 44 nt, synthetic construct
  source 1..44: mol_type = other RNA
cctgccatttcaccaggaacatgtaaacctgggggaaagccaga

SEQ ID NO: 24364 - RNA, 44 nt, synthetic construct
  source 1..44: mol_type = other RNA
cctgccatttcaccaggaacatgtagacctgggggaaagccaga

SEQ ID NO: 24365 - RNA, 44 nt, synthetic construct
  source 1..44: mol_type = other RNA
cctgccatttcaccaggaacatgtacacctgggggaaagccaga

SEQ ID NO: 24366 - RNA, 45 nt, synthetic construct
  source 1..45: mol_type = other RNA
tcctgccatttcaccaggaacatgtacacctgggggaaagccaga

SEQ ID NO: 24367 - RNA, 45 nt, synthetic construct
  source 1..45: mol_type = other RNA
tcctgccatttcaccaggaacatgtagacctgggggaaagccaga

SEQ ID NO: 24368 - RNA, 45 nt, synthetic construct
  source 1..45: mol_type = other RNA
tcctgccatttcaccaggaacatgtaaacctgggggaaagccaga

SEQ ID NO: 24369 - RNA, 45 nt, synthetic construct
  source 1..45: mol_type = other RNA
tcctgccatttcaccaggaacatgtatacctgggggaaagccaga

SEQ ID NO: 24370 - RNA, 46 nt, synthetic construct
  source 1..46: mol_type = other RNA
gtcctgccatttcaccaggaacatgtaaacctgggggaaagccaga

SEQ ID NO: 24371 - RNA, 46 nt, synthetic construct
  source 1..46: mol_type = other RNA
gtcctgccatttcaccaggaacatgtatacctgggggaaagccaga

SEQ ID NO: 24372 - RNA, 46 nt, synthetic construct
  source 1..46: mol_type = other RNA
gtcctgccatttcaccaggaacatgtagacctgggggaaagccaga

SEQ ID NO: 24373 - RNA, 46 nt, synthetic construct
  source 1..46: mol_type = other RNA
gtcctgccatttcaccaggaacatgtacacctgggggaaagccaga

SEQ ID NO: 24374 - RNA, 47 nt, synthetic construct
  source 1..47: mol_type = other RNA
ggtcctgccatttcaccaggaacatgtatacctgggggaaagccaga

SEQ ID NO: 24375 - RNA, 47 nt, synthetic construct
  source 1..47: mol_type = other RNA
ggtcctgccatttcaccaggaacatgtagacctgggggaaagccaga

SEQ ID NO: 24376 - RNA, 47 nt, synthetic construct
  source 1..47: mol_type = other RNA
ggtcctgccatttcaccaggaacatgtacacctgggggaaagccaga

SEQ ID NO: 24377 - RNA, 47 nt, synthetic construct
  source 1..47: mol_type = other RNA
ggtcctgccatttcaccaggaacatgtaaacctgggggaaagccaga

SEQ ID NO: 24378 - RNA, 48 nt, synthetic construct
  source 1..48: mol_type = other RNA
aggtcctgccatttcaccaggaacatgtaaacctgggggaaagccaga

SEQ ID NO: 24379 - RNA, 48 nt, synthetic construct
  source 1..48: mol_type = other RNA
aggtcctgccatttcaccaggaacatgtagacctgggggaaagccaga

SEQ ID NO: 24380 - RNA, 48 nt, synthetic construct
  source 1..48: mol_type = other RNA
aggtcctgccatttcaccaggaacatgtatacctgggggaaagccaga

SEQ ID NO: 24381 - RNA, 48 nt, synthetic construct
  source 1..48: mol_type = other RNA
aggtcctgccatttcaccaggaacatgtacacctgggggaaagccaga

SEQ ID NO: 24382 - RNA, 49 nt, synthetic construct
  source 1..49: mol_type = other RNA
caggtcctgccatttcaccaggaacatgtaaacctgggggaaagccaga

SEQ ID NO: 24383 - RNA, 49 nt, synthetic construct
  source 1..49: mol_type = other RNA
caggtcctgccatttcaccaggaacatgtatacctgggggaaagccaga

SEQ ID NO: 24384 - RNA, 49 nt, synthetic construct
  source 1..49: mol_type = other RNA
caggtcctgccatttcaccaggaacatgtacacctgggggaaagccaga

SEQ ID NO: 24385 - RNA, 49 nt, synthetic construct
  source 1..49: mol_type = other RNA
caggtcctgccatttcaccaggaacatgtagacctgggggaaagccaga

SEQ ID NO: 24386 - RNA, 50 nt, synthetic construct
  source 1..50: mol_type = other RNA
acaggtcctgccatttcaccaggaacatgtagacctgggggaaagccaga

SEQ ID NO: 24387 - RNA, 50 nt, synthetic construct
  source 1..50: mol_type = other RNA
acaggtcctgccatttcaccaggaacatgtatacctgggggaaagccaga

SEQ ID NO: 24388 - RNA, 50 nt, synthetic construct
  source 1..50: mol_type = other RNA
acaggtcctgccatttcaccaggaacatgtaaacctgggggaaagccaga

SEQ ID NO: 24389 - RNA, 50 nt, synthetic construct
  source 1..50: mol_type = other RNA
acaggtcctgccatttcaccaggaacatgtacacctgggggaaagccaga

SEQ ID NO: 24390 - RNA, 51 nt, synthetic construct
  source 1..51: mol_type = other RNA
gacaggtcctgccatttcaccaggaacatgtagacctgggggaaagccaga

SEQ ID NO: 24391 - RNA, 51 nt, synthetic construct
  source 1..51: mol_type = other RNA
gacaggtcctgccatttcaccaggaacatgtatacctgggggaaagccaga

SEQ ID NO: 24392 - RNA, 51 nt, synthetic construct
  source 1..51: mol_type = other RNA
gacaggtcctgccatttcaccaggaacatgtacacctgggggaaagccaga

SEQ ID NO: 24393 - RNA, 51 nt, synthetic construct
  source 1..51: mol_type = other RNA
gacaggtcctgccatttcaccaggaacatgtaaacctgggggaaagccaga

SEQ ID NO: 24394 - RNA, 52 nt, synthetic construct
  source 1..52: mol_type = other RNA
cgacaggtcctgccatttcaccaggaacatgtacacctgggggaaagccaga

SEQ ID NO: 24395 - RNA, 52 nt, synthetic construct
  source 1..52: mol_type = other RNA
cgacaggtcctgccatttcaccaggaacatgtaaacctgggggaaagccaga

SEQ ID NO: 24396 - RNA, 52 nt, synthetic construct
  source 1..52: mol_type = other RNA
cgacaggtcctgccatttcaccaggaacatgtagacctgggggaaagccaga

SEQ ID NO: 24397 - RNA, 52 nt, synthetic construct
  source 1..52: mol_type = other RNA
cgacaggtcctgccatttcaccaggaacatgtatacctgggggaaagccaga

SEQ ID NO: 24398 - RNA, 53 nt, synthetic construct
  source 1..53: mol_type = other RNA
ccgacaggtcctgccatttcaccaggaacatgtatacctgggggaaagccaga

SEQ ID NO: 24399 - RNA, 53 nt, synthetic construct
  source 1..53: mol_type = other RNA
ccgacaggtcctgccatttcaccaggaacatgtagacctgggggaaagccaga

SEQ ID NO: 24400 - RNA, 53 nt, synthetic construct
  source 1..53: mol_type = other RNA
ccgacaggtcctgccatttcaccaggaacatgtacacctgggggaaagccaga

SEQ ID NO: 24401 - RNA, 53 nt, synthetic construct
  source 1..53: mol_type = other RNA
ccgacaggtcctgccatttcaccaggaacatgtaaacctgggggaaagccaga

SEQ ID NO: 24402 - RNA, 54 nt, synthetic construct
  source 1..54: mol_type = other RNA
tccgacaggtcctgccatttcaccaggaacatgtagacctgggggaaagccaga

SEQ ID NO: 24403 - RNA, 54 nt, synthetic construct
  source 1..54: mol_type = other RNA
tccgacaggtcctgccatttcaccaggaacatgtacacctgggggaaagccaga

SEQ ID NO: 24404 - RNA, 54 nt, synthetic construct
  source 1..54: mol_type = other RNA
tccgacaggtcctgccatttcaccaggaacatgtatacctgggggaaagccaga

SEQ ID NO: 24405 - RNA, 54 nt, synthetic construct
  source 1..54: mol_type = other RNA
tccgacaggtcctgccatttcaccaggaacatgtaaacctgggggaaagccaga

SEQ ID NO: 24406 - RNA, 55 nt, synthetic construct
  source 1..55: mol_type = other RNA
ctccgacaggtcctgccatttcaccaggaacatgtaaacctgggggaaagccaga

SEQ ID NO: 24407 - RNA, 55 nt, synthetic construct
  source 1..55: mol_type = other RNA
ctccgacaggtcctgccatttcaccaggaacatgtacacctgggggaaagccaga

SEQ ID NO: 24408 - RNA, 55 nt, synthetic construct
  source 1..55: mol_type = other RNA
ctccgacaggtcctgccatttcaccaggaacatgtatacctgggggaaagccaga

SEQ ID NO: 24409 - RNA, 55 nt, synthetic construct
  source 1..55: mol_type = other RNA
ctccgacaggtcctgccatttcaccaggaacatgtagacctgggggaaagccaga

SEQ ID NO: 24410 - RNA, 56 nt, synthetic construct
  source 1..56: mol_type = other RNA
tctccgacaggtcctgccatttcaccaggaacatgtacacctgggggaaagccaga

SEQ ID NO: 24411 - RNA, 56 nt, synthetic construct
  source 1..56: mol_type = other RNA
tctccgacaggtcctgccatttcaccaggaacatgtatacctgggggaaagccaga

SEQ ID NO: 24412 - RNA, 56 nt, synthetic construct
  source 1..56: mol_type = other RNA
tctccgacaggtcctgccatttcaccaggaacatgtagacctgggggaaagccaga

SEQ ID NO: 24413 - RNA, 56 nt, synthetic construct
  source 1..56: mol_type = other RNA
tctccgacaggtcctgccatttcaccaggaacatgtaaacctgggggaaagccaga

SEQ ID NO: 24414 - RNA, 57 nt, synthetic construct
  source 1..57: mol_type = other RNA
ttctccgacaggtcctgccatttcaccaggaacatgtatacctgggggaaagccaga

SEQ ID NO: 24415 - RNA, 57 nt, synthetic construct
  source 1..57: mol_type = other RNA
ttctccgacaggtcctgccatttcaccaggaacatgtaaacctgggggaaagccaga

SEQ ID NO: 24416 - RNA, 57 nt, synthetic construct
  source 1..57: mol_type = other RNA
ttctccgacaggtcctgccatttcaccaggaacatgtacacctgggggaaagccaga

SEQ ID NO: 24417 - RNA, 57 nt, synthetic construct
  source 1..57: mol_type = other RNA
ttctccgacaggtcctgccatttcaccaggaacatgtagacctgggggaaagccaga

SEQ ID NO: 24418 - RNA, 58 nt, synthetic construct
  source 1..58: mol_type = other RNA
cttctccgacaggtcctgccatttcaccaggaacatgtagacctgggggaaagccaga

SEQ ID NO: 24419 - RNA, 58 nt, synthetic construct
  source 1..58: mol_type = other RNA
cttctccgacaggtcctgccatttcaccaggaacatgtacacctgggggaaagccaga

SEQ ID NO: 24420 - RNA, 58 nt, synthetic construct
  source 1..58: mol_type = other RNA
cttctccgacaggtcctgccatttcaccaggaacatgtatacctgggggaaagccaga

SEQ ID NO: 24421 - RNA, 58 nt, synthetic construct
  source 1..58: mol_type = other RNA
cttctccgacaggtcctgccatttcaccaggaacatgtaaacctgggggaaagccaga

SEQ ID NO: 24422 - RNA, 59 nt, synthetic construct
  source 1..59: mol_type = other RNA
ccttctccgacaggtcctgccatttcaccaggaacatgtacacctgggggaaagccaga

SEQ ID NO: 24423 - RNA, 59 nt, synthetic construct
  source 1..59: mol_type = other RNA
ccttctccgacaggtcctgccatttcaccaggaacatgtatacctgggggaaagccaga

SEQ ID NO: 24424 - RNA, 59 nt, synthetic construct
  source 1..59: mol_type = other RNA
ccttctccgacaggtcctgccatttcaccaggaacatgtagacctgggggaaagccaga

SEQ ID NO: 24425 - RNA, 59 nt, synthetic construct
  source 1..59: mol_type = other RNA
ccttctccgacaggtcctgccatttcaccaggaacatgtaaacctgggggaaagccaga

SEQ ID NO: 24426 - RNA, 60 nt, synthetic construct
  source 1..60: mol_type = other RNA
accttctccgacaggtcctgccatttcaccaggaacatgtaaacctgggggaaagccaga

SEQ ID NO: 24427 - RNA, 60 nt, synthetic construct
  source 1..60: mol_type = other RNA
accttctccgacaggtcctgccatttcaccaggaacatgtacacctgggggaaagccaga

SEQ ID NO: 24428 - RNA, 60 nt, synthetic construct
  source 1..60: mol_type = other RNA
accttctccgacaggtcctgccatttcaccaggaacatgtagacctgggggaaagccaga

SEQ ID NO: 24429 - RNA, 60 nt, synthetic construct
  source 1..60: mol_type = other RNA
accttctccgacaggtcctgccatttcaccaggaacatgtatacctgggggaaagccaga

SEQ ID NO: 24430 - RNA, 61 nt, synthetic construct
  source 1..61: mol_type = other RNA
caccttctccgacaggtcctgccatttcaccaggaacatgtatacctgggggaaagccaga

SEQ ID NO: 24431 - RNA, 61 nt, synthetic construct
  source 1..61: mol_type = other RNA
caccttctccgacaggtcctgccatttcaccaggaacatgtaaacctgggggaaagccaga

SEQ ID NO: 24432 - RNA, 61 nt, synthetic construct
  source 1..61: mol_type = other RNA
caccttctccgacaggtcctgccatttcaccaggaacatgtagacctgggggaaagccaga

SEQ ID NO: 24433 - RNA, 61 nt, synthetic construct
  source 1..61: mol_type = other RNA
caccttctccgacaggtcctgccatttcaccaggaacatgtacacctgggggaaagccaga

SEQ ID NO: 24434 - RNA, 62 nt, synthetic construct
  source 1..62: mol_type = other RNA
ccaccttctccgacaggtcctgccatttcaccaggaacatgtatacctgggggaaagccaga

SEQ ID NO: 24435 - RNA, 62 nt, synthetic construct
  source 1..62: mol_type = other RNA
ccaccttctccgacaggtcctgccatttcaccaggaacatgtagacctgggggaaagccaga

SEQ ID NO: 24436 - RNA, 62 nt, synthetic construct
  source 1..62: mol_type = other RNA
ccaccttctccgacaggtcctgccatttcaccaggaacatgtacacctgggggaaagccaga

SEQ ID NO: 24437 - RNA, 62 nt, synthetic construct
  source 1..62: mol_type = other RNA
ccaccttctccgacaggtcctgccatttcaccaggaacatgtaaacctgggggaaagccaga

SEQ ID NO: 24438 - RNA, 63 nt, synthetic construct
  source 1..63: mol_type = other RNA
accaccttctccgacaggtcctgccatttcaccaggaacatgtacacctgggggaaagccaga

SEQ ID NO: 24439 - RNA, 63 nt, synthetic construct
  source 1..63: mol_type = other RNA
accaccttctccgacaggtcctgccatttcaccaggaacatgtagacctgggggaaagccaga

SEQ ID NO: 24440 - RNA, 63 nt, synthetic construct
  source 1..63: mol_type = other RNA
accaccttctccgacaggtcctgccatttcaccaggaacatgtatacctgggggaaagccaga

SEQ ID NO: 24441 - RNA, 63 nt, synthetic construct
  source 1..63: mol_type = other RNA
accaccttctccgacaggtcctgccatttcaccaggaacatgtaaacctgggggaaagccaga

SEQ ID NO: 24442 - RNA, 64 nt, synthetic construct
  source 1..64: mol_type = other RNA
gaccaccttctccgacaggtcctgccatttcaccaggaacatgtagacctgggggaaagccaga

SEQ ID NO: 24443 - RNA, 64 nt, synthetic construct
  source 1..64: mol_type = other RNA
gaccaccttctccgacaggtcctgccatttcaccaggaacatgtacacctgggggaaagccaga

SEQ ID NO: 24444 - RNA, 64 nt, synthetic construct
  source 1..64: mol_type = other RNA
gaccaccttctccgacaggtcctgccatttcaccaggaacatgtaaacctgggggaaagccaga

SEQ ID NO: 24445 - RNA, 64 nt, synthetic construct
  source 1..64: mol_type = other RNA
gaccaccttctccgacaggtcctgccatttcaccaggaacatgtatacctgggggaaagccaga

SEQ ID NO: 24446 - RNA, 65 nt, synthetic construct
  source 1..65: mol_type = other RNA
agaccaccttctccgacaggtcctgccatttcaccaggaacatgtatacctgggggaaagccaga

SEQ ID NO: 24447 - RNA, 65 nt, synthetic construct
  source 1..65: mol_type = other RNA
agaccaccttctccgacaggtcctgccatttcaccaggaacatgtagacctgggggaaagccaga

SEQ ID NO: 24448 - RNA, 65 nt, synthetic construct
  source 1..65: mol_type = other RNA
agaccaccttctccgacaggtcctgccatttcaccaggaacatgtacacctgggggaaagccaga

SEQ ID NO: 24449 - RNA, 65 nt, synthetic construct
  source 1..65: mol_type = other RNA
agaccaccttctccgacaggtcctgccatttcaccaggaacatgtaaacctgggggaaagccaga

SEQ ID NO: 24450 - RNA, 66 nt, synthetic construct
  source 1..66: mol_type = other RNA
tagaccaccttctccgacaggtcctgccatttcaccaggaacatgtatacctgggggaaagccaga

SEQ ID NO: 24451 - RNA, 66 nt, synthetic construct
  source 1..66: mol_type = other RNA
tagaccaccttctccgacaggtcctgccatttcaccaggaacatgtacacctgggggaaagccaga

SEQ ID NO: 24452 - RNA, 66 nt, synthetic construct
  source 1..66: mol_type = other RNA
tagaccaccttctccgacaggtcctgccatttcaccaggaacatgtaaacctgggggaaagccaga

SEQ ID NO: 24453 - RNA, 66 nt, synthetic construct
  source 1..66: mol_type = other RNA
tagaccaccttctccgacaggtcctgccatttcaccaggaacatgtagacctgggggaaagccaga

SEQ ID NO: 24454 - RNA, 67 nt, synthetic construct
  source 1..67: mol_type = other RNA
gtagaccaccttctccgacaggtcctgccatttcaccaggaacatgtaaacctgggggaaagccaga

SEQ ID NO: 24455 - RNA, 67 nt, synthetic construct
  source 1..67: mol_type = other RNA
gtagaccaccttctccgacaggtcctgccatttcaccaggaacatgtacacctgggggaaagccaga

SEQ ID NO: 24456 - RNA, 67 nt, synthetic construct
  source 1..67: mol_type = other RNA
gtagaccaccttctccgacaggtcctgccatttcaccaggaacatgtatacctgggggaaagccaga

SEQ ID NO: 24457 - RNA, 67 nt, synthetic construct
  source 1..67: mol_type = other RNA
gtagaccaccttctccgacaggtcctgccatttcaccaggaacatgtagacctgggggaaagccaga

SEQ ID NO: 24458 - RNA, 68 nt, synthetic construct
  source 1..68: mol_type = other RNA
ggtagaccaccttctccgacaggtcctgccatttcaccaggaacatgtatacctgggggaaagccaga

SEQ ID NO: 24459 - RNA, 68 nt, synthetic construct
  source 1..68: mol_type = other RNA
ggtagaccaccttctccgacaggtcctgccatttcaccaggaacatgtacacctgggggaaagccaga

SEQ ID NO: 24460 - RNA, 68 nt, synthetic construct
  source 1..68: mol_type = other RNA
ggtagaccaccttctccgacaggtcctgccatttcaccaggaacatgtaaacctgggggaaagccaga

SEQ ID NO: 24461 - RNA, 68 nt, synthetic construct
  source 1..68: mol_type = other RNA
ggtagaccaccttctccgacaggtcctgccatttcaccaggaacatgtagacctgggggaaagccaga

SEQ ID NO: 24462 - RNA, 69 nt, synthetic construct
  source 1..69: mol_type = other RNA
cggtagaccaccttctccgacaggtcctgccatttcaccaggaacatgtatacctgggggaaagccaga

SEQ ID NO: 24463 - RNA, 69 nt, synthetic construct
  source 1..69: mol_type = other RNA
cggtagaccaccttctccgacaggtcctgccatttcaccaggaacatgtaaacctgggggaaagccaga

SEQ ID NO: 24464 - RNA, 69 nt, synthetic construct
  source 1..69: mol_type = other RNA
cggtagaccaccttctccgacaggtcctgccatttcaccaggaacatgtacacctgggggaaagccaga

SEQ ID NO: 24465 - RNA, 69 nt, synthetic construct
  source 1..69: mol_type = other RNA
cggtagaccaccttctccgacaggtcctgccatttcaccaggaacatgtagacctgggggaaagccaga

SEQ ID NO: 24466 - RNA, 70 nt, synthetic construct
  source 1..70: mol_type = other RNA
ccggtagaccaccttctccgacaggtcctgccatttcaccaggaacatgtagacctgggggaaagccaga

SEQ ID NO: 24467 - RNA, 70 nt, synthetic construct
  source 1..70: mol_type = other RNA
ccggtagaccaccttctccgacaggtcctgccatttcaccaggaacatgtaaacctgggggaaagccaga

SEQ ID NO: 24468 - RNA, 70 nt, synthetic construct
  source 1..70: mol_type = other RNA
ccggtagaccaccttctccgacaggtcctgccatttcaccaggaacatgtacacctgggggaaagccaga

SEQ ID NO: 24469 - RNA, 70 nt, synthetic construct
  source 1..70: mol_type = other RNA
ccggtagaccaccttctccgacaggtcctgccatttcaccaggaacatgtatacctgggggaaagccaga

SEQ ID NO: 24470 - RNA, 71 nt, synthetic construct
  source 1..71: mol_type = other RNA
gccggtagaccaccttctccgacaggtcctgccatttcaccaggaacatgtacacctgggggaaagccaga

SEQ ID NO: 24471 - RNA, 71 nt, synthetic construct
  source 1..71: mol_type = other RNA
gccggtagaccaccttctccgacaggtcctgccatttcaccaggaacatgtagacctgggggaaagccaga

SEQ ID NO: 24472 - RNA, 71 nt, synthetic construct
  source 1..71: mol_type = other RNA
gccggtagaccaccttctccgacaggtcctgccatttcaccaggaacatgtaaacctgggggaaagccaga

SEQ ID NO: 24473 - RNA, 71 nt, synthetic construct
  source 1..71: mol_type = other RNA
gccggtagaccaccttctccgacaggtcctgccatttcaccaggaacatgtatacctgggggaaagccaga

SEQ ID NO: 24474 - RNA, 72 nt, synthetic construct
  source 1..72: mol_type = other RNA
cgccggtagaccaccttctccgacaggtcctgccatttcaccaggaacatgtaaacctgggggaaagccaga

SEQ ID NO: 24475 - RNA, 72 nt, synthetic construct
  source 1..72: mol_type = other RNA
cgccggtagaccaccttctccgacaggtcctgccatttcaccaggaacatgtacacctgggggaaagccaga

SEQ ID NO: 24476 - RNA, 72 nt, synthetic construct
  source 1..72: mol_type = other RNA
cgccggtagaccaccttctccgacaggtcctgccatttcaccaggaacatgtagacctgggggaaagccaga

SEQ ID NO: 24477 - RNA, 72 nt, synthetic construct
  source 1..72: mol_type = other RNA
cgccggtagaccaccttctccgacaggtcctgccatttcaccaggaacatgtatacctgggggaaagccaga

SEQ ID NO: 24478 - RNA, 73 nt, synthetic construct
  source 1..73: mol_type = other RNA
gcgccggtagaccaccttctccgacaggtcctgccatttcaccaggaacatgtatacctgggggaaagccaga

SEQ ID NO: 24479 - RNA, 73 nt, synthetic construct
  source 1..73: mol_type = other RNA
gcgccggtagaccaccttctccgacaggtcctgccatttcaccaggaacatgtagacctgggggaaagccaga

SEQ ID NO: 24480 - RNA, 73 nt, synthetic construct
  source 1..73: mol_type = other RNA
gcgccggtagaccaccttctccgacaggtcctgccatttcaccaggaacatgtacacctgggggaaagccaga

SEQ ID NO: 24481 - RNA, 73 nt, synthetic construct
  source 1..73: mol_type = other RNA
gcgccggtagaccaccttctccgacaggtcctgccatttcaccaggaacatgtaaacctgggggaaagccaga

SEQ ID NO: 24482 - RNA, 74 nt, synthetic construct
  source 1..74: mol_type = other RNA
agcgccggtagaccaccttctccgacaggtcctgccatttcaccaggaacatgtagacctgggggaaagccaga

SEQ ID NO: 24483 - RNA, 74 nt, synthetic construct
  source 1..74: mol_type = other RNA
agcgccggtagaccaccttctccgacaggtcctgccatttcaccaggaacatgtatacctgggggaaagccaga

SEQ ID NO: 24484 - RNA, 74 nt, synthetic construct
  source 1..74: mol_type = other RNA
agcgccggtagaccaccttctccgacaggtcctgccatttcaccaggaacatgtaaacctgggggaaagccaga

SEQ ID NO: 24485 - RNA, 74 nt, synthetic construct
  source 1..74: mol_type = other RNA
agcgccggtagaccaccttctccgacaggtcctgccatttcaccaggaacatgtacacctgggggaaagccaga

SEQ ID NO: 24486 - RNA, 75 nt, synthetic construct
  source 1..75: mol_type = other RNA
aagcgccggtagaccaccttctccgacaggtcctgccatttcaccaggaacatgtacacctgggggaaagccaga

SEQ ID NO: 24487 - RNA, 75 nt, synthetic construct
  source 1..75: mol_type = other RNA
aagcgccggtagaccaccttctccgacaggtcctgccatttcaccaggaacatgtatacctgggggaaagccaga

SEQ ID NO: 24488 - RNA, 75 nt, synthetic construct
  source 1..75: mol_type = other RNA
aagcgccggtagaccaccttctccgacaggtcctgccatttcaccaggaacatgtaaacctgggggaaagccaga

SEQ ID NO: 24489 - RNA, 75 nt, synthetic construct
  source 1..75: mol_type = other RNA
aagcgccggtagaccaccttctccgacaggtcctgccatttcaccaggaacatgtagacctgggggaaagccaga

SEQ ID NO: 24490 - RNA, 76 nt, synthetic construct
  source 1..76: mol_type = other RNA
gaagcgccggtagaccaccttctccgacaggtcctgccatttcaccaggaacatgtatacctgggggaaagccaga

SEQ ID NO: 24491 - RNA, 76 nt, synthetic construct
  source 1..76: mol_type = other RNA
gaagcgccggtagaccaccttctccgacaggtcctgccatttcaccaggaacatgtagacctgggggaaagccaga

SEQ ID NO: 24492 - RNA, 76 nt, synthetic construct
  source 1..76: mol_type = other RNA
gaagcgccggtagaccaccttctccgacaggtcctgccatttcaccaggaacatgtacacctgggggaaagccaga

SEQ ID NO: 24493 - RNA, 76 nt, synthetic construct
  source 1..76: mol_type = other RNA
gaagcgccggtagaccaccttctccgacaggtcctgccatttcaccaggaacatgtaaacctgggggaaagccaga

SEQ ID NO: 24494 - RNA, 77 nt, synthetic construct
  source 1..77: mol_type = other RNA
tgaagcgccggtagaccaccttctccgacaggtcctgccatttcaccaggaacatgtatacctgggggaaagccaga

SEQ ID NO: 24495 - RNA, 77 nt, synthetic construct
  source 1..77: mol_type = other RNA
tgaagcgccggtagaccaccttctccgacaggtcctgccatttcaccaggaacatgtagacctgggggaaagccaga

SEQ ID NO: 24496 - RNA, 77 nt, synthetic construct
  source 1..77: mol_type = other RNA
tgaagcgccggtagaccaccttctccgacaggtcctgccatttcaccaggaacatgtacacctgggggaaagccaga

SEQ ID NO: 24497 - RNA, 77 nt, synthetic construct
  source 1..77: mol_type = other RNA
tgaagcgccggtagaccaccttctccgacaggtcctgccatttcaccaggaacatgtaaacctgggggaaagccaga

SEQ ID NO: 24498 - RNA, 78 nt, synthetic construct
  source 1..78: mol_type = other RNA
gtgaagcgccggtagaccaccttctccgacaggtcctgccatttcaccaggaacatgtagacctgggggaaagccaga

SEQ ID NO: 24499 - RNA, 78 nt, synthetic construct
  source 1..78: mol_type = other RNA
gtgaagcgccggtagaccaccttctccgacaggtcctgccatttcaccaggaacatgtaaacctgggggaaagccaga

SEQ ID NO: 24500 - RNA, 78 nt, synthetic construct
  source 1..78: mol_type = other RNA
gtgaagcgccggtagaccaccttctccgacaggtcctgccatttcaccaggaacatgtacacctgggggaaagccaga

SEQ ID NO: 24501 - RNA, 78 nt, synthetic construct
  source 1..78: mol_type = other RNA
gtgaagcgccggtagaccaccttctccgacaggtcctgccatttcaccaggaacatgtatacctgggggaaagccaga

SEQ ID NO: 24502 - RNA, 79 nt, synthetic construct
  source 1..79: mol_type = other RNA
ggtgaagcgccggtagaccaccttctccgacaggtcctgccatttcaccaggaacatgtatacctgggggaaagccaga

SEQ ID NO: 24503 - RNA, 79 nt, synthetic construct
  source 1..79: mol_type = other RNA
ggtgaagcgccggtagaccaccttctccgacaggtcctgccatttcaccaggaacatgtaaacctgggggaaagccaga

SEQ ID NO: 24504 - RNA, 79 nt, synthetic construct
  source 1..79: mol_type = other RNA
ggtgaagcgccggtagaccaccttctccgacaggtcctgccatttcaccaggaacatgtacacctgggggaaagccaga

SEQ ID NO: 24505 - RNA, 79 nt, synthetic construct
  source 1..79: mol_type = other RNA
ggtgaagcgccggtagaccaccttctccgacaggtcctgccatttcaccaggaacatgtagacctgggggaaagccaga

SEQ ID NO: 24506 - RNA, 80 nt, synthetic construct
  source 1..80: mol_type = other RNA
cggtgaagcgccggtagaccaccttctccgacaggtcctgccatttcaccaggaacatgtagacctgggggaaagccaga

SEQ ID NO: 24507 - RNA, 80 nt, synthetic construct
  source 1..80: mol_type = other RNA
cggtgaagcgccggtagaccaccttctccgacaggtcctgccatttcaccaggaacatgtacacctgggggaaagccaga

SEQ ID NO: 24508 - RNA, 80 nt, synthetic construct
  source 1..80: mol_type = other RNA
cggtgaagcgccggtagaccaccttctccgacaggtcctgccatttcaccaggaacatgtatacctgggggaaagccaga

SEQ ID NO: 24509 - RNA, 80 nt, synthetic construct
  source 1..80: mol_type = other RNA
cggtgaagcgccggtagaccaccttctccgacaggtcctgccatttcaccaggaacatgtaaacctgggggaaagccaga

SEQ ID NO: 24510 - RNA, 81 nt, synthetic construct
  source 1..81: mol_type = other RNA
tcggtgaagcgccggtagaccaccttctccgacaggtcctgccatttcaccaggaacatgtaaacctgggggaaagccaga

SEQ ID NO: 24511 - RNA, 81 nt, synthetic construct
  source 1..81: mol_type = other RNA
tcggtgaagcgccggtagaccaccttctccgacaggtcctgccatttcaccaggaacatgtatacctgggggaaagccaga

SEQ ID NO: 24512 - RNA, 81 nt, synthetic construct
  source 1..81: mol_type = other RNA
tcggtgaagcgccggtagaccaccttctccgacaggtcctgccatttcaccaggaacatgtagacctgggggaaagccaga

SEQ ID NO: 24513 - RNA, 81 nt, synthetic construct
  source 1..81: mol_type = other RNA
tcggtgaagcgccggtagaccaccttctccgacaggtcctgccatttcaccaggaacatgtacacctgggggaaagccaga

SEQ ID NO: 24514 - RNA, 82 nt, synthetic construct
  source 1..82: mol_type = other RNA
ctcggtgaagcgccggtagaccaccttctccgacaggtcctgccatttcaccaggaacatgtacacctgggggaaagccaga

SEQ ID NO: 24515 - RNA, 82 nt, synthetic construct
  source 1..82: mol_type = other RNA
ctcggtgaagcgccggtagaccaccttctccgacaggtcctgccatttcaccaggaacatgtagacctgggggaaagccaga

SEQ ID NO: 24516 - RNA, 82 nt, synthetic construct
  source 1..82: mol_type = other RNA
ctcggtgaagcgccggtagaccaccttctccgacaggtcctgccatttcaccaggaacatgtaaacctgggggaaagccaga

SEQ ID NO: 24517 - RNA, 82 nt, synthetic construct
  source 1..82: mol_type = other RNA
ctcggtgaagcgccggtagaccaccttctccgacaggtcctgccatttcaccaggaacatgtatacctgggggaaagccaga

SEQ ID NO: 24518 - RNA, 83 nt, synthetic construct
  source 1..83: mol_type = other RNA
tctcggtgaagcgccggtagaccaccttctccgacaggtcctgccatttcaccaggaacatgtaaacctgggggaaagccaga

SEQ ID NO: 24519 - RNA, 83 nt, synthetic construct
  source 1..83: mol_type = other RNA
tctcggtgaagcgccggtagaccaccttctccgacaggtcctgccatttcaccaggaacatgtagacctgggggaaagccaga

SEQ ID NO: 24520 - RNA, 83 nt, synthetic construct
  source 1..83: mol_type = other RNA
tctcggtgaagcgccggtagaccaccttctccgacaggtcctgccatttcaccaggaacatgtacacctgggggaaagccaga

SEQ ID NO: 24521 - RNA, 83 nt, synthetic construct
  source 1..83: mol_type = other RNA
tctcggtgaagcgccggtagaccaccttctccgacaggtcctgccatttcaccaggaacatgtatacctgggggaaagccaga

SEQ ID NO: 24522 - RNA, 84 nt, synthetic construct
  source 1..84: mol_type = other RNA
atctcggtgaagcgccggtagaccaccttctccgacaggtcctgccatttcaccaggaacatgtaaacctgggggaaagccaga

SEQ ID NO: 24523 - RNA, 84 nt, synthetic construct
  source 1..84: mol_type = other RNA
atctcggtgaagcgccggtagaccaccttctccgacaggtcctgccatttcaccaggaacatgtagacctgggggaaagccaga

SEQ ID NO: 24524 - RNA, 84 nt, synthetic construct
  source 1..84: mol_type = other RNA
atctcggtgaagcgccggtagaccaccttctccgacaggtcctgccatttcaccaggaacatgtacacctgggggaaagccaga

SEQ ID NO: 24525 - RNA, 84 nt, synthetic construct
  source 1..84: mol_type = other RNA
atctcggtgaagcgccggtagaccaccttctccgacaggtcctgccatttcaccaggaacatgtatacctgggggaaagccaga

SEQ ID NO: 24526 - RNA, 85 nt, synthetic construct
  source 1..85: mol_type = other RNA
gatctcggtgaagcgccggtagaccaccttctccgacaggtcctgccatttcaccaggaacatgtatacctgggggaaagccaga

SEQ ID NO: 24527 - RNA, 85 nt, synthetic construct
  source 1..85: mol_type = other RNA
gatctcggtgaagcgccggtagaccaccttctccgacaggtcctgccatttcaccaggaacatgtaaacctgggggaaagccaga

SEQ ID NO: 24528 - RNA, 85 nt, synthetic construct
  source 1..85: mol_type = other RNA
gatctcggtgaagcgccggtagaccaccttctccgacaggtcctgccatttcaccaggaacatgtagacctgggggaaagccaga

SEQ ID NO: 24529 - RNA, 85 nt, synthetic construct
  source 1..85: mol_type = other RNA
gatctcggtgaagcgccggtagaccaccttctccgacaggtcctgccatttcaccaggaacatgtacacctgggggaaagccaga

SEQ ID NO: 24530 - RNA, 86 nt, synthetic construct
  source 1..86: mol_type = other RNA
agatctcggtgaagcgccggtagaccaccttctccgacaggtcctgccatttcaccaggaacatgtacacctgggggaaagccaga

SEQ ID NO: 24531 - RNA, 86 nt, synthetic construct
  source 1..86: mol_type = other RNA
agatctcggtgaagcgccggtagaccaccttctccgacaggtcctgccatttcaccaggaacatgtatacctgggggaaagccaga

SEQ ID NO: 24532 - RNA, 86 nt, synthetic construct
  source 1..86: mol_type = other RNA
agatctcggtgaagcgccggtagaccaccttctccgacaggtcctgccatttcaccaggaacatgtaaacctgggggaaagccaga

SEQ ID NO: 24533 - RNA, 86 nt, synthetic construct
  source 1..86: mol_type = other RNA
agatctcggtgaagcgccggtagaccaccttctccgacaggtcctgccatttcaccaggaacatgtagacctgggggaaagccaga

SEQ ID NO: 24534 - RNA, 87 nt, synthetic construct
  source 1..87: mol_type = other RNA
tagatctcggtgaagcgccggtagaccaccttctccgacaggtcctgccatttcaccaggaacatgtaaacctgggggaaagccaga

SEQ ID NO: 24535 - RNA, 87 nt, synthetic construct
  source 1..87: mol_type = other RNA
tagatctcggtgaagcgccggtagaccaccttctccgacaggtcctgccatttcaccaggaacatgtacacctgggggaaagccaga

SEQ ID NO: 24536 - RNA, 87 nt, synthetic construct
  source 1..87: mol_type = other RNA
tagatctcggtgaagcgccggtagaccaccttctccgacaggtcctgccatttcaccaggaacatgtagacctgggggaaagccaga

SEQ ID NO: 24537 - RNA, 87 nt, synthetic construct
  source 1..87: mol_type = other RNA
tagatctcggtgaagcgccggtagaccaccttctccgacaggtcctgccatttcaccaggaacatgtatacctgggggaaagccaga

SEQ ID NO: 24538 - RNA, 88 nt, synthetic construct
  source 1..88: mol_type = other RNA
gtagatctcggtgaagcgccggtagaccaccttctccgacaggtcctgccatttcaccaggaacatgtacacctgggggaaagccaga

SEQ ID NO: 24539 - RNA, 88 nt, synthetic construct
  source 1..88: mol_type = other RNA
gtagatctcggtgaagcgccggtagaccaccttctccgacaggtcctgccatttcaccaggaacatgtatacctgggggaaagccaga

SEQ ID NO: 24540 - RNA, 88 nt, synthetic construct
  source 1..88: mol_type = other RNA
gtagatctcggtgaagcgccggtagaccaccttctccgacaggtcctgccatttcaccaggaacatgtagacctgggggaaagccaga

SEQ ID NO: 24541 - RNA, 88 nt, synthetic construct
  source 1..88: mol_type = other RNA
gtagatctcggtgaagcgccggtagaccaccttctccgacaggtcctgccatttcaccaggaacatgtaaacctgggggaaagccaga

SEQ ID NO: 24542 - RNA, 89 nt, synthetic construct
  source 1..89: mol_type = other RNA
cgtagatctcggtgaagcgccggtagaccaccttctccgacaggtcctgccatttcaccaggaacatgtaaacctgggggaaagccaga

SEQ ID NO: 24543 - RNA, 89 nt, synthetic construct
  source 1..89: mol_type = other RNA
cgtagatctcggtgaagcgccggtagaccaccttctccgacaggtcctgccatttcaccaggaacatgtatacctgggggaaagccaga

SEQ ID NO: 24544 - RNA, 89 nt, synthetic construct
  source 1..89: mol_type = other RNA
cgtagatctcggtgaagcgccggtagaccaccttctccgacaggtcctgccatttcaccaggaacatgtagacctgggggaaagccaga

SEQ ID NO: 24545 - RNA, 89 nt, synthetic construct
  source 1..89: mol_type = other RNA
cgtagatctcggtgaagcgccggtagaccaccttctccgacaggtcctgccatttcaccaggaacatgtacacctgggggaaagccaga

SEQ ID NO: 24546 - RNA, 90 nt, synthetic construct
  source 1..90: mol_type = other RNA
tcgtagatctcggtgaagcgccggtagaccaccttctccgacaggtcctgccatttcaccaggaacatgtatacctgggggaaagccaga

SEQ ID NO: 24547 - RNA, 90 nt, synthetic construct
  source 1..90: mol_type = other RNA
tcgtagatctcggtgaagcgccggtagaccaccttctccgacaggtcctgccatttcaccaggaacatgtacacctgggggaaagccaga

SEQ ID NO: 24548 - RNA, 90 nt, synthetic construct
  source 1..90: mol_type = other RNA
tcgtagatctcggtgaagcgccggtagaccaccttctccgacaggtcctgccatttcaccaggaacatgtagacctgggggaaagccaga

SEQ ID NO: 24549 - RNA, 90 nt, synthetic construct
  source 1..90: mol_type = other RNA
tcgtagatctcggtgaagcgccggtagaccaccttctccgacaggtcctgccatttcaccaggaacatgtaaacctgggggaaagccaga

SEQ ID NO: 24550 - RNA, 91 nt, synthetic construct
  source 1..91: mol_type = other RNA
ctcgtagatctcggtgaagcgccggtagaccaccttctccgacaggtcctgccatttcaccaggaacatgtatacctgggggaaagccaga

SEQ ID NO: 24551 - RNA, 91 nt, synthetic construct
  source 1..91: mol_type = other RNA
ctcgtagatctcggtgaagcgccggtagaccaccttctccgacaggtcctgccatttcaccaggaacatgtagacctgggggaaagccaga

SEQ ID NO: 24552 - RNA, 91 nt, synthetic construct
  source 1..91: mol_type = other RNA
ctcgtagatctcggtgaagcgccggtagaccaccttctccgacaggtcctgccatttcaccaggaacatgtacacctgggggaaagccaga

SEQ ID NO: 24553 - RNA, 91 nt, synthetic construct
  source 1..91: mol_type = other RNA
ctcgtagatctcggtgaagcgccggtagaccaccttctccgacaggtcctgccatttcaccaggaacatgtaaacctgggggaaagccaga

SEQ ID NO: 24554 - RNA, 92 nt, synthetic construct
  source 1..92: mol_type = other RNA
actcgtagatctcggtgaagcgccggtagaccaccttctccgacaggtcctgccatttcaccaggaacatgtatacctgggggaaagccaga

SEQ ID NO: 24555 - RNA, 92 nt, synthetic construct
  source 1..92: mol_type = other RNA
actcgtagatctcggtgaagcgccggtagaccaccttctccgacaggtcctgccatttcaccaggaacatgtagacctgggggaaagccaga

SEQ ID NO: 24556 - RNA, 92 nt, synthetic construct
  source 1..92: mol_type = other RNA
actcgtagatctcggtgaagcgccggtagaccaccttctccgacaggtcctgccatttcaccaggaacatgtacacctgggggaaagccaga

SEQ ID NO: 24557 - RNA, 92 nt, synthetic construct
  source 1..92: mol_type = other RNA
actcgtagatctcggtgaagcgccggtagaccaccttctccgacaggtcctgccatttcaccaggaacatgtaaacctgggggaaagccaga

SEQ ID NO: 24558 - RNA, 93 nt, synthetic construct
  source 1..93: mol_type = other RNA
aactcgtagatctcggtgaagcgccggtagaccaccttctccgacaggtcctgccatttcaccaggaacatgtatacctgggggaaagccaga

SEQ ID NO: 24559 - RNA, 93 nt, synthetic construct
  source 1..93: mol_type = other RNA
aactcgtagatctcggtgaagcgccggtagaccaccttctccgacaggtcctgccatttcaccaggaacatgtacacctgggggaaagccaga

SEQ ID NO: 24560 - RNA, 93 nt, synthetic construct
  source 1..93: mol_type = other RNA
aactcgtagatctcggtgaagcgccggtagaccaccttctccgacaggtcctgccatttcaccaggaacatgtagacctgggggaaagccaga

SEQ ID NO: 24561 - RNA, 93 nt, synthetic construct
  source 1..93: mol_type = other RNA
aactcgtagatctcggtgaagcgccggtagaccaccttctccgacaggtcctgccatttcaccaggaacatgtaaacctgggggaaagccaga

SEQ ID NO: 24562 - RNA, 94 nt, synthetic construct
  source 1..94: mol_type = other RNA
gaactcgtagatctcggtgaagcgccggtagaccaccttctccgacaggtcctgccatttcaccaggaacatgtatacctgggggaaagccaga

SEQ ID NO: 24563 - RNA, 94 nt, synthetic construct
  source 1..94: mol_type = other RNA
gaactcgtagatctcggtgaagcgccggtagaccaccttctccgacaggtcctgccatttcaccaggaacatgtacacctgggggaaagccaga

SEQ ID NO: 24564 - RNA, 94 nt, synthetic construct
  source 1..94: mol_type = other RNA
gaactcgtagatctcggtgaagcgccggtagaccaccttctccgacaggtcctgccatttcaccaggaacatgtaaacctgggggaaagccaga

SEQ ID NO: 24565 - RNA, 94 nt, synthetic construct
  source 1..94: mol_type = other RNA
gaactcgtagatctcggtgaagcgccggtagaccaccttctccgacaggtcctgccatttcaccaggaacatgtagacctgggggaaagccaga

SEQ ID NO: 24566 - RNA, 95 nt, synthetic construct
  source 1..95: mol_type = other RNA
ggaactcgtagatctcggtgaagcgccggtagaccaccttctccgacaggtcctgccatttcaccaggaacatgtatacctgggggaaagccaga

SEQ ID NO: 24567 - RNA, 95 nt, synthetic construct
  source 1..95: mol_type = other RNA
ggaactcgtagatctcggtgaagcgccggtagaccaccttctccgacaggtcctgccatttcaccaggaacatgtagacctgggggaaagccaga

SEQ ID NO: 24568 - RNA, 95 nt, synthetic construct
  source 1..95: mol_type = other RNA
ggaactcgtagatctcggtgaagcgccggtagaccaccttctccgacaggtcctgccatttcaccaggaacatgtacacctgggggaaagccaga

SEQ ID NO: 24569 - RNA, 95 nt, synthetic construct
  source 1..95: mol_type = other RNA
ggaactcgtagatctcggtgaagcgccggtagaccaccttctccgacaggtcctgccatttcaccaggaacatgtaaacctgggggaaagccaga

SEQ ID NO: 24570 - RNA, 96 nt, synthetic construct
  source 1..96: mol_type = other RNA
tggaactcgtagatctcggtgaagcgccggtagaccaccttctccgacaggtcctgccatttcaccaggaacatgtatacctgggggaaagccaga

SEQ ID NO: 24571 - RNA, 96 nt, synthetic construct
  source 1..96: mol_type = other RNA
tggaactcgtagatctcggtgaagcgccggtagaccaccttctccgacaggtcctgccatttcaccaggaacatgtacacctgggggaaagccaga

SEQ ID NO: 24572 - RNA, 96 nt, synthetic construct
  source 1..96: mol_type = other RNA
tggaactcgtagatctcggtgaagcgccggtagaccaccttctccgacaggtcctgccatttcaccaggaacatgtagacctgggggaaagccaga

SEQ ID NO: 24573 - RNA, 96 nt, synthetic construct
  source 1..96: mol_type = other RNA
tggaactcgtagatctcggtgaagcgccggtagaccaccttctccgacaggtcctgccatttcaccaggaacatgtaaacctgggggaaagccaga

SEQ ID NO: 24574 - RNA, 97 nt, synthetic construct
  source 1..97: mol_type = other RNA
atggaactcgtagatctcggtgaagcgccggtagaccaccttctccgacaggtcctgccatttcaccaggaacatgtatacctgggggaaagccaga

SEQ ID NO: 24575 - RNA, 97 nt, synthetic construct
  source 1..97: mol_type = other RNA
atggaactcgtagatctcggtgaagcgccggtagaccaccttctccgacaggtcctgccatttcaccaggaacatgtaaacctgggggaaagccaga

SEQ ID NO: 24576 - RNA, 97 nt, synthetic construct
  source 1..97: mol_type = other RNA
atggaactcgtagatctcggtgaagcgccggtagaccaccttctccgacaggtcctgccatttcaccaggaacatgtacacctgggggaaagccaga

SEQ ID NO: 24577 - RNA, 97 nt, synthetic construct
  source 1..97: mol_type = other RNA
atggaactcgtagatctcggtgaagcgccggtagaccaccttctccgacaggtcctgccatttcaccaggaacatgtagacctgggggaaagccaga

SEQ ID NO: 24578 - RNA, 98 nt, synthetic construct
  source 1..98: mol_type = other RNA
catggaactcgtagatctcggtgaagcgccggtagaccaccttctccgacaggtcctgccatttcaccaggaacatgtatacctgggggaaagccaga

SEQ ID NO: 24579 - RNA, 98 nt, synthetic construct
  source 1..98: mol_type = other RNA
catggaactcgtagatctcggtgaagcgccggtagaccaccttctccgacaggtcctgccatttcaccaggaacatgtaaacctgggggaaagccaga

SEQ ID NO: 24580 - RNA, 98 nt, synthetic construct
  source 1..98: mol_type = other RNA
catggaactcgtagatctcggtgaagcgccggtagaccaccttctccgacaggtcctgccatttcaccaggaacatgtacacctgggggaaagccaga

SEQ ID NO: 24581 - RNA, 98 nt, synthetic construct
  source 1..98: mol_type = other RNA
catggaactcgtagatctcggtgaagcgccggtagaccaccttctccgacaggtcctgccatttcaccaggaacatgtagacctgggggaaagccaga

SEQ ID NO: 24582 - RNA, 99 nt, synthetic construct
  source 1..99: mol_type = other RNA
acatggaactcgtagatctcggtgaagcgccggtagaccaccttctccgacaggtcctgccatttcaccaggaacatgtaaacctgggggaaagccaga

SEQ ID NO: 24583 - RNA, 99 nt, synthetic construct
  source 1..99: mol_type = other RNA
acatggaactcgtagatctcggtgaagcgccggtagaccaccttctccgacaggtcctgccatttcaccaggaacatgtacacctgggggaaagccaga

SEQ ID NO: 24584 - RNA, 99 nt, synthetic construct
  source 1..99: mol_type = other RNA
acatggaactcgtagatctcggtgaagcgccggtagaccaccttctccgacaggtcctgccatttcaccaggaacatgtagacctgggggaaagccaga

SEQ ID NO: 24585 - RNA, 99 nt, synthetic construct
  source 1..99: mol_type = other RNA
acatggaactcgtagatctcggtgaagcgccggtagaccaccttctccgacaggtcctgccatttcaccaggaacatgtatacctgggggaaagccaga

SEQ ID NO: 24586 - RNA, 100 nt, synthetic construct
  source 1..100: mol_type = other RNA
cacatggaactcgtagatctcggtgaagcgccggtagaccaccttctccgacaggtcctgccatttcaccaggaacatgtaaacctgggggaaagccaga

SEQ ID NO: 24587 - RNA, 100 nt, synthetic construct
  source 1..100: mol_type = other RNA
cacatggaactcgtagatctcggtgaagcgccggtagaccaccttctccgacaggtcctgccatttcaccaggaacatgtacacctgggggaaagccaga

SEQ ID NO: 24588 - RNA, 100 nt, synthetic construct
  source 1..100: mol_type = other RNA
cacatggaactcgtagatctcggtgaagcgccggtagaccaccttctccgacaggtcctgccatttcaccaggaacatgtatacctgggggaaagccaga

SEQ ID NO: 24589 - RNA, 100 nt, synthetic construct
  source 1..100: mol_type = other RNA
cacatggaactcgtagatctcggtgaagcgccggtagaccaccttctccgacaggtcctgccatttcaccaggaacatgtagacctgggggaaagccaga

SEQ ID NO: 24590 - RNA, 101 nt, synthetic construct
  source 1..101: mol_type = other RNA
tcacatggaactcgtagatctcggtgaagcgccggtagaccaccttctccgacaggtcctgccatttcaccaggaacatgtacacctgggggaaagccaga

SEQ ID NO: 24591 - RNA, 101 nt, synthetic construct
  source 1..101: mol_type = other RNA
tcacatggaactcgtagatctcggtgaagcgccggtagaccaccttctccgacaggtcctgccatttcaccaggaacatgtaaacctgggggaaagccaga

SEQ ID NO: 24592 - RNA, 101 nt, synthetic construct
  source 1..101: mol_type = other RNA
tcacatggaactcgtagatctcggtgaagcgccggtagaccaccttctccgacaggtcctgccatttcaccaggaacatgtagacctgggggaaagccaga

SEQ ID NO: 24593 - RNA, 101 nt, synthetic construct
  source 1..101: mol_type = other RNA
tcacatggaactcgtagatctcggtgaagcgccggtagaccaccttctccgacaggtcctgccatttcaccaggaacatgtatacctgggggaaagccaga

SEQ ID NO: 24594 - RNA, 102 nt, synthetic construct
  source 1..102: mol_type = other RNA
ctcacatggaactcgtagatctcggtgaagcgccggtagaccaccttctccgacaggtcctgccatttcaccaggaacatgtatacctgggggaaagccaga

SEQ ID NO: 24595 - RNA, 102 nt, synthetic construct
  source 1..102: mol_type = other RNA
ctcacatggaactcgtagatctcggtgaagcgccggtagaccaccttctccgacaggtcctgccatttcaccaggaacatgtagacctgggggaaagccaga

SEQ ID NO: 24596 - RNA, 102 nt, synthetic construct
  source 1..102: mol_type = other RNA
ctcacatggaactcgtagatctcggtgaagcgccggtagaccaccttctccgacaggtcctgccatttcaccaggaacatgtacacctgggggaaagccaga

SEQ ID NO: 24597 - RNA, 102 nt, synthetic construct
  source 1..102: mol_type = other RNA
ctcacatggaactcgtagatctcggtgaagcgccggtagaccaccttctccgacaggtcctgccatttcaccaggaacatgtaaacctgggggaaagccaga

SEQ ID NO: 24598 - RNA, 103 nt, synthetic construct
  source 1..103: mol_type = other RNA
actcacatggaactcgtagatctcggtgaagcgccggtagaccaccttctccgacaggtcctgccatttcaccaggaacatgtagacctgggggaaagccaga

SEQ ID NO: 24599 - RNA, 103 nt, synthetic construct
  source 1..103: mol_type = other RNA
actcacatggaactcgtagatctcggtgaagcgccggtagaccaccttctccgacaggtcctgccatttcaccaggaacatgtaaacctgggggaaagccaga

SEQ ID NO: 24600 - RNA, 103 nt, synthetic construct
  source 1..103: mol_type = other RNA
actcacatggaactcgtagatctcggtgaagcgccggtagaccaccttctccgacaggtcctgccatttcaccaggaacatgtatacctgggggaaagccaga

SEQ ID NO: 24601 - RNA, 103 nt, synthetic construct
  source 1..103: mol_type = other RNA
actcacatggaactcgtagatctcggtgaagcgccggtagaccaccttctccgacaggtcctgccatttcaccaggaacatgtacacctgggggaaagccaga

SEQ ID NO: 24602 - RNA, 16 nt, synthetic construct
  source 1..16: mol_type = other RNA
ctctggctttccccca

SEQ ID NO: 24603 - RNA, 17 nt, synthetic construct
  source 1..17: mol_type = other RNA
actctggctttccccca

SEQ ID NO: 24604 - RNA, 18 nt, synthetic construct
  source 1..18: mol_type = other RNA
gactctggctttccccca

SEQ ID NO: 24605 - RNA, 19 nt, synthetic construct
  source 1..19: mol_type = other RNA
cgactctggctttccccca

SEQ ID NO: 24606 - RNA, 20 nt, synthetic construct
  source 1..20: mol_type = other RNA
ccgactctggctttccccca

SEQ ID NO: 24607 - RNA, 21 nt, synthetic construct
  source 1..21: mol_type = other RNA
cccgactctggctttccccca

SEQ ID NO: 24608 - RNA, 22 nt, synthetic construct
  source 1..22: mol_type = other RNA
ccccgactctggctttccccca

SEQ ID NO: 24609-24615 - skipped (7 entries)

SEQ ID NO: 24616 - RNA, 10 nt, synthetic construct
  source 1..10: mol_type = other RNA
gggaaagcca

SEQ ID NO: 24617 - RNA, 11 nt, synthetic construct
  source 1..11: mol_type = other RNA
gggaaagccag

SEQ ID NO: 24618 - RNA, 12 nt, synthetic construct
  source 1..12: mol_type = other RNA
gggaaagccaga

SEQ ID NO: 24619 - RNA, 13 nt, synthetic construct
  source 1..13: mol_type = other RNA
gggaaagccagag

SEQ ID NO: 24620 - RNA, 14 nt, synthetic construct
  source 1..14: mol_type = other RNA
gggaaagccagagt

SEQ ID NO: 24621 - RNA, 15 nt, synthetic construct
  source 1..15: mol_type = other RNA
gggaaagccagagtc

SEQ ID NO: 24622 - RNA, 16 nt, synthetic construct
  source 1..16: mol_type = other RNA
gggaaagccagagtcg

SEQ ID NO: 24623 - RNA, 17 nt, synthetic construct
  source 1..17: mol_type = other RNA
gggaaagccagagtcgg

SEQ ID NO: 24624 - RNA, 18 nt, synthetic construct
  source 1..18: mol_type = other RNA
gggaaagccagagtcggg

SEQ ID NO: 24625 - RNA, 19 nt, synthetic construct
  source 1..19: mol_type = other RNA
gggaaagccagagtcgggg

SEQ ID NO: 24626 - RNA, 10 nt, synthetic construct
  source 1..10: mol_type = other RNA
gtacacctgg

SEQ ID NO: 24627 - RNA, 10 nt, synthetic construct
  source 1..10: mol_type = other RNA
gtatacctgg

SEQ ID NO: 24628 - RNA, 10 nt, synthetic construct
  source 1..10: mol_type = other RNA
gtagacctgg

SEQ ID NO: 24629 - RNA, 10 nt, synthetic construct
  source 1..10: mol_type = other RNA
gtaaacctgg

SEQ ID NO: 24630 - RNA, 11 nt, synthetic construct
  source 1..11: mol_type = other RNA
tgtacacctgg

SEQ ID NO: 24631 - RNA, 11 nt, synthetic construct
  source 1..11: mol_type = other RNA
tgtaaacctgg

SEQ ID NO: 24632 - RNA, 11 nt, synthetic construct
  source 1..11: mol_type = other RNA
tgtagacctgg

SEQ ID NO: 24633 - RNA, 11 nt, synthetic construct
  source 1..11: mol_type = other RNA
tgtatacctgg

SEQ ID NO: 24634 - RNA, 12 nt, synthetic construct
  source 1..12: mol_type = other RNA
atgtatacctgg

SEQ ID NO: 24635 - RNA, 12 nt, synthetic construct
  source 1..12: mol_type = other RNA
atgtagacctgg

SEQ ID NO: 24636 - RNA, 12 nt, synthetic construct
  source 1..12: mol_type = other RNA
atgtacacctgg

SEQ ID NO: 24637 - RNA, 12 nt, synthetic construct
  source 1..12: mol_type = other RNA
atgtaaacctgg

SEQ ID NO: 24638 - RNA, 13 nt, synthetic construct
  source 1..13: mol_type = other RNA
catgtacacctgg

SEQ ID NO: 24639 - RNA, 13 nt, synthetic construct
  source 1..13: mol_type = other RNA
catgtagacctgg

SEQ ID NO: 24640 - RNA, 13 nt, synthetic construct
  source 1..13: mol_type = other RNA
catgtatacctgg

SEQ ID NO: 24641 - RNA, 13 nt, synthetic construct
  source 1..13: mol_type = other RNA
catgtaaacctgg

SEQ ID NO: 24642 - RNA, 14 nt, synthetic construct
  source 1..14: mol_type = other RNA
acatgtagacctgg

SEQ ID NO: 24643 - RNA, 14 nt, synthetic construct
  source 1..14: mol_type = other RNA
acatgtatacctgg

SEQ ID NO: 24644 - RNA, 14 nt, synthetic construct
  source 1..14: mol_type = other RNA
acatgtacacctgg

SEQ ID NO: 24645 - RNA, 14 nt, synthetic construct
  source 1..14: mol_type = other RNA
acatgtaaacctgg

SEQ ID NO: 24646 - RNA, 15 nt, synthetic construct
  source 1..15: mol_type = other RNA
aacatgtagacctgg

SEQ ID NO: 24647 - RNA, 15 nt, synthetic construct
  source 1..15: mol_type = other RNA
aacatgtaaacctgg

SEQ ID NO: 24648 - RNA, 15 nt, synthetic construct
  source 1..15: mol_type = other RNA
aacatgtacacctgg

SEQ ID NO: 24649 - RNA, 15 nt, synthetic construct
  source 1..15: mol_type = other RNA
aacatgtatacctgg

SEQ ID NO: 24650 - RNA, 16 nt, synthetic construct
  source 1..16: mol_type = other RNA
gaacatgtacacctgg

SEQ ID NO: 24651 - RNA, 16 nt, synthetic construct
  source 1..16: mol_type = other RNA
gaacatgtatacctgg

SEQ ID NO: 24652 - RNA, 16 nt, synthetic construct
  source 1..16: mol_type = other RNA
gaacatgtagacctgg

SEQ ID NO: 24653 - RNA, 16 nt, synthetic construct
  source 1..16: mol_type = other RNA
gaacatgtaaacctgg

SEQ ID NO: 24654 - RNA, 17 nt, synthetic construct
  source 1..17: mol_type = other RNA
ggaacatgtaaacctgg

SEQ ID NO: 24655 - RNA, 17 nt, synthetic construct
  source 1..17: mol_type = other RNA
ggaacatgtatacctgg

SEQ ID NO: 24656 - RNA, 17 nt, synthetic construct
  source 1..17: mol_type = other RNA
ggaacatgtacacctgg

SEQ ID NO: 24657 - RNA, 17 nt, synthetic construct
  source 1..17: mol_type = other RNA
ggaacatgtagacctgg

SEQ ID NO: 24658 - RNA, 18 nt, synthetic construct
  source 1..18: mol_type = other RNA
aggaacatgtatacctgg

SEQ ID NO: 24659 - RNA, 18 nt, synthetic construct
  source 1..18: mol_type = other RNA
aggaacatgtaaacctgg

SEQ ID NO: 24660 - RNA, 18 nt, synthetic construct
  source 1..18: mol_type = other RNA
aggaacatgtagacctgg

SEQ ID NO: 24661 - RNA, 18 nt, synthetic construct
  source 1..18: mol_type = other RNA
aggaacatgtacacctgg

SEQ ID NO: 24662 - RNA, 19 nt, synthetic construct
  source 1..19: mol_type = other RNA
caggaacatgtatacctgg

SEQ ID NO: 24663 - RNA, 19 nt, synthetic construct
  source 1..19: mol_type = other RNA
caggaacatgtaaacctgg

SEQ ID NO: 24664 - RNA, 19 nt, synthetic construct
  source 1..19: mol_type = other RNA
caggaacatgtacacctgg

SEQ ID NO: 24665 - RNA, 19 nt, synthetic construct
  source 1..19: mol_type = other RNA
caggaacatgtagacctgg

SEQ ID NO: 24666 - RNA, 20 nt, synthetic construct
  source 1..20: mol_type = other RNA
ccaggaacatgtatacctgg

SEQ ID NO: 24667 - RNA, 20 nt, synthetic construct
  source 1..20: mol_type = other RNA
ccaggaacatgtagacctgg

SEQ ID NO: 24668 - RNA, 20 nt, synthetic construct
  source 1..20: mol_type = other RNA
ccaggaacatgtacacctgg

SEQ ID NO: 24669 - RNA, 20 nt, synthetic construct
  source 1..20: mol_type = other RNA
ccaggaacatgtaaacctgg

SEQ ID NO: 24670 - RNA, 21 nt, synthetic construct
  source 1..21: mol_type = other RNA
accaggaacatgtaaacctgg

SEQ ID NO: 24671 - RNA, 21 nt, synthetic construct
  source 1..21: mol_type = other RNA
accaggaacatgtagacctgg

SEQ ID NO: 24672 - RNA, 21 nt, synthetic construct
  source 1..21: mol_type = other RNA
accaggaacatgtatacctgg

SEQ ID NO: 24673 - RNA, 21 nt, synthetic construct
  source 1..21: mol_type = other RNA
accaggaacatgtacacctgg

SEQ ID NO: 24674 - RNA, 22 nt, synthetic construct
  source 1..22: mol_type = other RNA
caccaggaacatgtatacctgg

SEQ ID NO: 24675 - RNA, 22 nt, synthetic construct
  source 1..22: mol_type = other RNA
caccaggaacatgtagacctgg

SEQ ID NO: 24676 - RNA, 22 nt, synthetic construct
  source 1..22: mol_type = other RNA
caccaggaacatgtacacctgg

SEQ ID NO: 24677 - RNA, 22 nt, synthetic construct
  source 1..22: mol_type = other RNA
caccaggaacatgtaaacctgg

SEQ ID NO: 24678 - RNA, 23 nt, synthetic construct
  source 1..23: mol_type = other RNA
tcaccaggaacatgtatacctgg

SEQ ID NO: 24679 - RNA, 23 nt, synthetic construct
  source 1..23: mol_type = other RNA
tcaccaggaacatgtagacctgg

SEQ ID NO: 24680 - RNA, 23 nt, synthetic construct
  source 1..23: mol_type = other RNA
tcaccaggaacatgtacacctgg

SEQ ID NO: 24681 - RNA, 23 nt, synthetic construct
  source 1..23: mol_type = other RNA
tcaccaggaacatgtaaacctgg

SEQ ID NO: 24682 - RNA, 24 nt, synthetic construct
  source 1..24: mol_type = other RNA
ttcaccaggaacatgtaaacctgg

SEQ ID NO: 24683 - RNA, 24 nt, synthetic construct
  source 1..24: mol_type = other RNA
ttcaccaggaacatgtacacctgg

SEQ ID NO: 24684 - RNA, 24 nt, synthetic construct
  source 1..24: mol_type = other RNA
ttcaccaggaacatgtatacctgg

SEQ ID NO: 24685 - RNA, 24 nt, synthetic construct
  source 1..24: mol_type = other RNA
ttcaccaggaacatgtagacctgg

SEQ ID NO: 24686 - RNA, 25 nt, synthetic construct
  source 1..25: mol_type = other RNA
tttcaccaggaacatgtaaacctgg

SEQ ID NO: 24687 - RNA, 25 nt, synthetic construct
  source 1..25: mol_type = other RNA
tttcaccaggaacatgtagacctgg

SEQ ID NO: 24688 - RNA, 25 nt, synthetic construct
  source 1..25: mol_type = other RNA
tttcaccaggaacatgtatacctgg

SEQ ID NO: 24689 - RNA, 25 nt, synthetic construct
  source 1..25: mol_type = other RNA
tttcaccaggaacatgtacacctgg

SEQ ID NO: 24690 - RNA, 26 nt, synthetic construct
  source 1..26: mol_type = other RNA
atttcaccaggaacatgtacacctgg

SEQ ID NO: 24691 - RNA, 26 nt, synthetic construct
  source 1..26: mol_type = other RNA
atttcaccaggaacatgtagacctgg

SEQ ID NO: 24692 - RNA, 26 nt, synthetic construct
  source 1..26: mol_type = other RNA
atttcaccaggaacatgtatacctgg

SEQ ID NO: 24693 - RNA, 26 nt, synthetic construct
  source 1..26: mol_type = other RNA
atttcaccaggaacatgtaaacctgg

SEQ ID NO: 24694 - RNA, 27 nt, synthetic construct
  source 1..27: mol_type = other RNA
catttcaccaggaacatgtaaacctgg

SEQ ID NO: 24695 - RNA, 27 nt, synthetic construct
  source 1..27: mol_type = other RNA
catttcaccaggaacatgtacacctgg

SEQ ID NO: 24696 - RNA, 27 nt, synthetic construct
  source 1..27: mol_type = other RNA
catttcaccaggaacatgtagacctgg

SEQ ID NO: 24697 - RNA, 27 nt, synthetic construct
  source 1..27: mol_type = other RNA
catttcaccaggaacatgtatacctgg

SEQ ID NO: 24698 - RNA, 28 nt, synthetic construct
  source 1..28: mol_type = other RNA
ccatttcaccaggaacatgtatacctgg

SEQ ID NO: 24699 - RNA, 28 nt, synthetic construct
  source 1..28: mol_type = other RNA
ccatttcaccaggaacatgtagacctgg

SEQ ID NO: 24700 - RNA, 28 nt, synthetic construct
  source 1..28: mol_type = other RNA
ccatttcaccaggaacatgtaaacctgg

SEQ ID NO: 24701 - RNA, 28 nt, synthetic construct
  source 1..28: mol_type = other RNA
ccatttcaccaggaacatgtacacctgg

SEQ ID NO: 24702 - RNA, 29 nt, synthetic construct
  source 1..29: mol_type = other RNA
gccatttcaccaggaacatgtaaacctgg

SEQ ID NO: 24703 - RNA, 29 nt, synthetic construct
  source 1..29: mol_type = other RNA
gccatttcaccaggaacatgtacacctgg

SEQ ID NO: 24704 - RNA, 29 nt, synthetic construct
  source 1..29: mol_type = other RNA
gccatttcaccaggaacatgtagacctgg

SEQ ID NO: 24705 - RNA, 29 nt, synthetic construct
  source 1..29: mol_type = other RNA
gccatttcaccaggaacatgtatacctgg

SEQ ID NO: 24706 - RNA, 30 nt, synthetic construct
  source 1..30: mol_type = other RNA
tgccatttcaccaggaacatgtatacctgg

SEQ ID NO: 24707 - RNA, 30 nt, synthetic construct
  source 1..30: mol_type = other RNA
tgccatttcaccaggaacatgtagacctgg

SEQ ID NO: 24708 - RNA, 30 nt, synthetic construct
  source 1..30: mol_type = other RNA
tgccatttcaccaggaacatgtacacctgg

SEQ ID NO: 24709 - RNA, 30 nt, synthetic construct
  source 1..30: mol_type = other RNA
tgccatttcaccaggaacatgtaaacctgg

SEQ ID NO: 24710 - RNA, 31 nt, synthetic construct
  source 1..31: mol_type = other RNA
ctgccatttcaccaggaacatgtacacctgg

SEQ ID NO: 24711 - RNA, 31 nt, synthetic construct
  source 1..31: mol_type = other RNA
ctgccatttcaccaggaacatgtagacctgg

SEQ ID NO: 24712 - RNA, 31 nt, synthetic construct
  source 1..31: mol_type = other RNA
ctgccatttcaccaggaacatgtatacctgg

SEQ ID NO: 24713 - RNA, 31 nt, synthetic construct
  source 1..31: mol_type = other RNA
ctgccatttcaccaggaacatgtaaacctgg

SEQ ID NO: 24714 - RNA, 32 nt, synthetic construct
  source 1..32: mol_type = other RNA
cctgccatttcaccaggaacatgtaaacctgg

SEQ ID NO: 24715 - RNA, 32 nt, synthetic construct
  source 1..32: mol_type = other RNA
cctgccatttcaccaggaacatgtacacctgg

SEQ ID NO: 24716 - RNA, 32 nt, synthetic construct
  source 1..32: mol_type = other RNA
cctgccatttcaccaggaacatgtagacctgg

SEQ ID NO: 24717 - RNA, 32 nt, synthetic construct
  source 1..32: mol_type = other RNA
cctgccatttcaccaggaacatgtatacctgg

SEQ ID NO: 24718 - RNA, 33 nt, synthetic construct
  source 1..33: mol_type = other RNA
tcctgccatttcaccaggaacatgtagacctgg

SEQ ID NO: 24719 - RNA, 33 nt, synthetic construct
  source 1..33: mol_type = other RNA
tcctgccatttcaccaggaacatgtatacctgg

SEQ ID NO: 24720 - RNA, 33 nt, synthetic construct
  source 1..33: mol_type = other RNA
tcctgccatttcaccaggaacatgtacacctgg

SEQ ID NO: 24721 - RNA, 33 nt, synthetic construct
  source 1..33: mol_type = other RNA
tcctgccatttcaccaggaacatgtaaacctgg

SEQ ID NO: 24722 - RNA, 34 nt, synthetic construct
  source 1..34: mol_type = other RNA
gtcctgccatttcaccaggaacatgtagacctgg

SEQ ID NO: 24723 - RNA, 34 nt, synthetic construct
  source 1..34: mol_type = other RNA
gtcctgccatttcaccaggaacatgtaaacctgg

SEQ ID NO: 24724 - RNA, 34 nt, synthetic construct
  source 1..34: mol_type = other RNA
gtcctgccatttcaccaggaacatgtatacctgg

SEQ ID NO: 24725 - RNA, 34 nt, synthetic construct
  source 1..34: mol_type = other RNA
gtcctgccatttcaccaggaacatgtacacctgg

SEQ ID NO: 24726 - RNA, 35 nt, synthetic construct
  source 1..35: mol_type = other RNA
ggtcctgccatttcaccaggaacatgtagacctgg

SEQ ID NO: 24727 - RNA, 35 nt, synthetic construct
  source 1..35: mol_type = other RNA
ggtcctgccatttcaccaggaacatgtacacctgg

SEQ ID NO: 24728 - RNA, 35 nt, synthetic construct
  source 1..35: mol_type = other RNA
ggtcctgccatttcaccaggaacatgtaaacctgg

SEQ ID NO: 24729 - RNA, 35 nt, synthetic construct
  source 1..35: mol_type = other RNA
ggtcctgccatttcaccaggaacatgtatacctgg

SEQ ID NO: 24730 - RNA, 36 nt, synthetic construct
  source 1..36: mol_type = other RNA
aggtcctgccatttcaccaggaacatgtagacctgg

SEQ ID NO: 24731 - RNA, 36 nt, synthetic construct
  source 1..36: mol_type = other RNA
aggtcctgccatttcaccaggaacatgtacacctgg

SEQ ID NO: 24732 - RNA, 36 nt, synthetic construct
  source 1..36: mol_type = other RNA
aggtcctgccatttcaccaggaacatgtaaacctgg

SEQ ID NO: 24733 - RNA, 36 nt, synthetic construct
  source 1..36: mol_type = other RNA
aggtcctgccatttcaccaggaacatgtatacctgg

SEQ ID NO: 24734 - RNA, 37 nt, synthetic construct
  source 1..37: mol_type = other RNA
caggtcctgccatttcaccaggaacatgtatacctgg

SEQ ID NO: 24735 - RNA, 37 nt, synthetic construct
  source 1..37: mol_type = other RNA
caggtcctgccatttcaccaggaacatgtacacctgg

SEQ ID NO: 24736 - RNA, 37 nt, synthetic construct
  source 1..37: mol_type = other RNA
caggtcctgccatttcaccaggaacatgtagacctgg

SEQ ID NO: 24737 - RNA, 37 nt, synthetic construct
  source 1..37: mol_type = other RNA
caggtcctgccatttcaccaggaacatgtaaacctgg

SEQ ID NO: 24738 - RNA, 38 nt, synthetic construct
  source 1..38: mol_type = other RNA
acaggtcctgccatttcaccaggaacatgtaaacctgg

SEQ ID NO: 24739 - RNA, 38 nt, synthetic construct
  source 1..38: mol_type = other RNA
acaggtcctgccatttcaccaggaacatgtatacctgg

SEQ ID NO: 24740 - RNA, 38 nt, synthetic construct
  source 1..38: mol_type = other RNA
acaggtcctgccatttcaccaggaacatgtagacctgg

SEQ ID NO: 24741 - RNA, 38 nt, synthetic construct
  source 1..38: mol_type = other RNA
acaggtcctgccatttcaccaggaacatgtacacctgg

SEQ ID NO: 24742 - RNA, 39 nt, synthetic construct
  source 1..39: mol_type = other RNA
gacaggtcctgccatttcaccaggaacatgtatacctgg

SEQ ID NO: 24743 - RNA, 39 nt, synthetic construct
  source 1..39: mol_type = other RNA
gacaggtcctgccatttcaccaggaacatgtaaacctgg

SEQ ID NO: 24744 - RNA, 39 nt, synthetic construct
  source 1..39: mol_type = other RNA
gacaggtcctgccatttcaccaggaacatgtacacctgg

SEQ ID NO: 24745 - RNA, 39 nt, synthetic construct
  source 1..39: mol_type = other RNA
gacaggtcctgccatttcaccaggaacatgtagacctgg

SEQ ID NO: 24746 - RNA, 40 nt, synthetic construct
  source 1..40: mol_type = other RNA
cgacaggtcctgccatttcaccaggaacatgtagacctgg

SEQ ID NO: 24747 - RNA, 40 nt, synthetic construct
  source 1..40: mol_type = other RNA
cgacaggtcctgccatttcaccaggaacatgtatacctgg

SEQ ID NO: 24748 - RNA, 40 nt, synthetic construct
  source 1..40: mol_type = other RNA
cgacaggtcctgccatttcaccaggaacatgtaaacctgg

SEQ ID NO: 24749 - RNA, 40 nt, synthetic construct
  source 1..40: mol_type = other RNA
cgacaggtcctgccatttcaccaggaacatgtacacctgg

SEQ ID NO: 24750 - RNA, 41 nt, synthetic construct
  source 1..41: mol_type = other RNA
ccgacaggtcctgccatttcaccaggaacatgtaaacctgg

SEQ ID NO: 24751 - RNA, 41 nt, synthetic construct
  source 1..41: mol_type = other RNA
ccgacaggtcctgccatttcaccaggaacatgtacacctgg

SEQ ID NO: 24752 - RNA, 41 nt, synthetic construct
  source 1..41: mol_type = other RNA
ccgacaggtcctgccatttcaccaggaacatgtagacctgg

SEQ ID NO: 24753 - RNA, 41 nt, synthetic construct
  source 1..41: mol_type = other RNA
ccgacaggtcctgccatttcaccaggaacatgtatacctgg

SEQ ID NO: 24754 - RNA, 42 nt, synthetic construct
  source 1..42: mol_type = other RNA
tccgacaggtcctgccatttcaccaggaacatgtatacctgg

SEQ ID NO: 24755 - RNA, 42 nt, synthetic construct
  source 1..42: mol_type = other RNA
tccgacaggtcctgccatttcaccaggaacatgtagacctgg

SEQ ID NO: 24756 - RNA, 42 nt, synthetic construct
  source 1..42: mol_type = other RNA
tccgacaggtcctgccatttcaccaggaacatgtacacctgg

SEQ ID NO: 24757 - RNA, 42 nt, synthetic construct
  source 1..42: mol_type = other RNA
tccgacaggtcctgccatttcaccaggaacatgtaaacctgg

SEQ ID NO: 24758 - RNA, 43 nt, synthetic construct
  source 1..43: mol_type = other RNA
ctccgacaggtcctgccatttcaccaggaacatgtacacctgg

SEQ ID NO: 24759 - RNA, 43 nt, synthetic construct
  source 1..43: mol_type = other RNA
ctccgacaggtcctgccatttcaccaggaacatgtagacctgg

SEQ ID NO: 24760 - RNA, 43 nt, synthetic construct
  source 1..43: mol_type = other RNA
ctccgacaggtcctgccatttcaccaggaacatgtaaacctgg

SEQ ID NO: 24761 - RNA, 43 nt, synthetic construct
  source 1..43: mol_type = other RNA
ctccgacaggtcctgccatttcaccaggaacatgtatacctgg

SEQ ID NO: 24762 - RNA, 44 nt, synthetic construct
  source 1..44: mol_type = other RNA
tctccgacaggtcctgccatttcaccaggaacatgtatacctgg

SEQ ID NO: 24763 - RNA, 44 nt, synthetic construct
  source 1..44: mol_type = other RNA
tctccgacaggtcctgccatttcaccaggaacatgtagacctgg

SEQ ID NO: 24764 - RNA, 44 nt, synthetic construct
  source 1..44: mol_type = other RNA
tctccgacaggtcctgccatttcaccaggaacatgtacacctgg

SEQ ID NO: 24765 - RNA, 44 nt, synthetic construct
  source 1..44: mol_type = other RNA
tctccgacaggtcctgccatttcaccaggaacatgtaaacctgg

SEQ ID NO: 24766 - RNA, 45 nt, synthetic construct
  source 1..45: mol_type = other RNA
ttctccgacaggtcctgccatttcaccaggaacatgtacacctgg

SEQ ID NO: 24767 - RNA, 45 nt, synthetic construct
  source 1..45: mol_type = other RNA
ttctccgacaggtcctgccatttcaccaggaacatgtaaacctgg

SEQ ID NO: 24768 - RNA, 45 nt, synthetic construct
  source 1..45: mol_type = other RNA
ttctccgacaggtcctgccatttcaccaggaacatgtatacctgg

SEQ ID NO: 24769 - RNA, 45 nt, synthetic construct
  source 1..45: mol_type = other RNA
ttctccgacaggtcctgccatttcaccaggaacatgtagacctgg

SEQ ID NO: 24770 - RNA, 46 nt, synthetic construct
  source 1..46: mol_type = other RNA
cttctccgacaggtcctgccatttcaccaggaacatgtaaacctgg

SEQ ID NO: 24771 - RNA, 46 nt, synthetic construct
  source 1..46: mol_type = other RNA
cttctccgacaggtcctgccatttcaccaggaacatgtacacctgg

SEQ ID NO: 24772 - RNA, 46 nt, synthetic construct
  source 1..46: mol_type = other RNA
cttctccgacaggtcctgccatttcaccaggaacatgtagacctgg

SEQ ID NO: 24773 - RNA, 46 nt, synthetic construct
  source 1..46: mol_type = other RNA
cttctccgacaggtcctgccatttcaccaggaacatgtatacctgg

SEQ ID NO: 24774 - RNA, 47 nt, synthetic construct
  source 1..47: mol_type = other RNA
ccttctccgacaggtcctgccatttcaccaggaacatgtatacctgg

SEQ ID NO: 24775 - RNA, 47 nt, synthetic construct
  source 1..47: mol_type = other RNA
ccttctccgacaggtcctgccatttcaccaggaacatgtagacctgg

SEQ ID NO: 24776 - RNA, 47 nt, synthetic construct
  source 1..47: mol_type = other RNA
ccttctccgacaggtcctgccatttcaccaggaacatgtaaacctgg

SEQ ID NO: 24777 - RNA, 47 nt, synthetic construct
  source 1..47: mol_type = other RNA
ccttctccgacaggtcctgccatttcaccaggaacatgtacacctgg

SEQ ID NO: 24778 - RNA, 48 nt, synthetic construct
  source 1..48: mol_type = other RNA
accttctccgacaggtcctgccatttcaccaggaacatgtatacctgg

SEQ ID NO: 24779 - RNA, 48 nt, synthetic construct
  source 1..48: mol_type = other RNA
accttctccgacaggtcctgccatttcaccaggaacatgtagacctgg

SEQ ID NO: 24780 - RNA, 48 nt, synthetic construct
  source 1..48: mol_type = other RNA
accttctccgacaggtcctgccatttcaccaggaacatgtaaacctgg

SEQ ID NO: 24781 - RNA, 48 nt, synthetic construct
  source 1..48: mol_type = other RNA
accttctccgacaggtcctgccatttcaccaggaacatgtacacctgg

SEQ ID NO: 24782 - RNA, 49 nt, synthetic construct
  source 1..49: mol_type = other RNA
caccttctccgacaggtcctgccatttcaccaggaacatgtacacctgg

SEQ ID NO: 24783 - RNA, 49 nt, synthetic construct
  source 1..49: mol_type = other RNA
caccttctccgacaggtcctgccatttcaccaggaacatgtagacctgg

SEQ ID NO: 24784 - RNA, 49 nt, synthetic construct
  source 1..49: mol_type = other RNA
caccttctccgacaggtcctgccatttcaccaggaacatgtaaacctgg

SEQ ID NO: 24785 - RNA, 49 nt, synthetic construct
  source 1..49: mol_type = other RNA
caccttctccgacaggtcctgccatttcaccaggaacatgtatacctgg

SEQ ID NO: 24786 - RNA, 50 nt, synthetic construct
  source 1..50: mol_type = other RNA
ccaccttctccgacaggtcctgccatttcaccaggaacatgtacacctgg

SEQ ID NO: 24787 - RNA, 50 nt, synthetic construct
  source 1..50: mol_type = other RNA
ccaccttctccgacaggtcctgccatttcaccaggaacatgtatacctgg

SEQ ID NO: 24788 - RNA, 50 nt, synthetic construct
  source 1..50: mol_type = other RNA
ccaccttctccgacaggtcctgccatttcaccaggaacatgtaaacctgg

SEQ ID NO: 24789 - RNA, 50 nt, synthetic construct
  source 1..50: mol_type = other RNA
ccaccttctccgacaggtcctgccatttcaccaggaacatgtagacctgg

SEQ ID NO: 24790 - RNA, 51 nt, synthetic construct
  source 1..51: mol_type = other RNA
accaccttctccgacaggtcctgccatttcaccaggaacatgtagacctgg

SEQ ID NO: 24791 - RNA, 51 nt, synthetic construct
  source 1..51: mol_type = other RNA
accaccttctccgacaggtcctgccatttcaccaggaacatgtatacctgg

SEQ ID NO: 24792 - RNA, 51 nt, synthetic construct
  source 1..51: mol_type = other RNA
accaccttctccgacaggtcctgccatttcaccaggaacatgtacacctgg

SEQ ID NO: 24793 - RNA, 51 nt, synthetic construct
  source 1..51: mol_type = other RNA
accaccttctccgacaggtcctgccatttcaccaggaacatgtaaacctgg

SEQ ID NO: 24794 - RNA, 52 nt, synthetic construct
  source 1..52: mol_type = other RNA
gaccaccttctccgacaggtcctgccatttcaccaggaacatgtatacctgg

SEQ ID NO: 24795 - RNA, 52 nt, synthetic construct
  source 1..52: mol_type = other RNA
gaccaccttctccgacaggtcctgccatttcaccaggaacatgtacacctgg

SEQ ID NO: 24796 - RNA, 52 nt, synthetic construct
  source 1..52: mol_type = other RNA
gaccaccttctccgacaggtcctgccatttcaccaggaacatgtagacctgg

SEQ ID NO: 24797 - RNA, 52 nt, synthetic construct
  source 1..52: mol_type = other RNA
gaccaccttctccgacaggtcctgccatttcaccaggaacatgtaaacctgg

SEQ ID NO: 24798 - RNA, 53 nt, synthetic construct
  source 1..53: mol_type = other RNA
agaccaccttctccgacaggtcctgccatttcaccaggaacatgtagacctgg

SEQ ID NO: 24799 - RNA, 53 nt, synthetic construct
  source 1..53: mol_type = other RNA
agaccaccttctccgacaggtcctgccatttcaccaggaacatgtaaacctgg

SEQ ID NO: 24800 - RNA, 53 nt, synthetic construct
  source 1..53: mol_type = other RNA
agaccaccttctccgacaggtcctgccatttcaccaggaacatgtatacctgg

SEQ ID NO: 24801 - RNA, 53 nt, synthetic construct
  source 1..53: mol_type = other RNA
agaccaccttctccgacaggtcctgccatttcaccaggaacatgtacacctgg

SEQ ID NO: 24802 - RNA, 54 nt, synthetic construct
  source 1..54: mol_type = other RNA
tagaccaccttctccgacaggtcctgccatttcaccaggaacatgtatacctgg

SEQ ID NO: 24803 - RNA, 54 nt, synthetic construct
  source 1..54: mol_type = other RNA
tagaccaccttctccgacaggtcctgccatttcaccaggaacatgtagacctgg

SEQ ID NO: 24804 - RNA, 54 nt, synthetic construct
  source 1..54: mol_type = other RNA
tagaccaccttctccgacaggtcctgccatttcaccaggaacatgtacacctgg

SEQ ID NO: 24805 - RNA, 54 nt, synthetic construct
  source 1..54: mol_type = other RNA
tagaccaccttctccgacaggtcctgccatttcaccaggaacatgtaaacctgg

SEQ ID NO: 24806 - RNA, 55 nt, synthetic construct
  source 1..55: mol_type = other RNA
gtagaccaccttctccgacaggtcctgccatttcaccaggaacatgtaaacctgg

SEQ ID NO: 24807 - RNA, 55 nt, synthetic construct
  source 1..55: mol_type = other RNA
gtagaccaccttctccgacaggtcctgccatttcaccaggaacatgtacacctgg

SEQ ID NO: 24808 - RNA, 55 nt, synthetic construct
  source 1..55: mol_type = other RNA
gtagaccaccttctccgacaggtcctgccatttcaccaggaacatgtatacctgg

SEQ ID NO: 24809 - RNA, 55 nt, synthetic construct
  source 1..55: mol_type = other RNA
gtagaccaccttctccgacaggtcctgccatttcaccaggaacatgtagacctgg

SEQ ID NO: 24810 - RNA, 56 nt, synthetic construct
  source 1..56: mol_type = other RNA
ggtagaccaccttctccgacaggtcctgccatttcaccaggaacatgtatacctgg

SEQ ID NO: 24811 - RNA, 56 nt, synthetic construct
  source 1..56: mol_type = other RNA
ggtagaccaccttctccgacaggtcctgccatttcaccaggaacatgtagacctgg

SEQ ID NO: 24812 - RNA, 56 nt, synthetic construct
  source 1..56: mol_type = other RNA
ggtagaccaccttctccgacaggtcctgccatttcaccaggaacatgtacacctgg

SEQ ID NO: 24813 - RNA, 56 nt, synthetic construct
  source 1..56: mol_type = other RNA
ggtagaccaccttctccgacaggtcctgccatttcaccaggaacatgtaaacctgg

SEQ ID NO: 24814 - RNA, 57 nt, synthetic construct
  source 1..57: mol_type = other RNA
cggtagaccaccttctccgacaggtcctgccatttcaccaggaacatgtaaacctgg

SEQ ID NO: 24815 - RNA, 57 nt, synthetic construct
  source 1..57: mol_type = other RNA
cggtagaccaccttctccgacaggtcctgccatttcaccaggaacatgtagacctgg

SEQ ID NO: 24816 - RNA, 57 nt, synthetic construct
  source 1..57: mol_type = other RNA
cggtagaccaccttctccgacaggtcctgccatttcaccaggaacatgtatacctgg

SEQ ID NO: 24817 - RNA, 57 nt, synthetic construct
  source 1..57: mol_type = other RNA
cggtagaccaccttctccgacaggtcctgccatttcaccaggaacatgtacacctgg

SEQ ID NO: 24818 - RNA, 58 nt, synthetic construct
  source 1..58: mol_type = other RNA
ccggtagaccaccttctccgacaggtcctgccatttcaccaggaacatgtagacctgg

SEQ ID NO: 24819 - RNA, 58 nt, synthetic construct
  source 1..58: mol_type = other RNA
ccggtagaccaccttctccgacaggtcctgccatttcaccaggaacatgtatacctgg

SEQ ID NO: 24820 - RNA, 58 nt, synthetic construct
  source 1..58: mol_type = other RNA
ccggtagaccaccttctccgacaggtcctgccatttcaccaggaacatgtaaacctgg

SEQ ID NO: 24821 - RNA, 58 nt, synthetic construct
  source 1..58: mol_type = other RNA
ccggtagaccaccttctccgacaggtcctgccatttcaccaggaacatgtacacctgg

SEQ ID NO: 24822 - RNA, 59 nt, synthetic construct
  source 1..59: mol_type = other RNA
gccggtagaccaccttctccgacaggtcctgccatttcaccaggaacatgtaaacctgg

SEQ ID NO: 24823 - RNA, 59 nt, synthetic construct
  source 1..59: mol_type = other RNA
gccggtagaccaccttctccgacaggtcctgccatttcaccaggaacatgtagacctgg

SEQ ID NO: 24824 - RNA, 59 nt, synthetic construct
  source 1..59: mol_type = other RNA
gccggtagaccaccttctccgacaggtcctgccatttcaccaggaacatgtatacctgg

SEQ ID NO: 24825 - RNA, 59 nt, synthetic construct
  source 1..59: mol_type = other RNA
gccggtagaccaccttctccgacaggtcctgccatttcaccaggaacatgtacacctgg

SEQ ID NO: 24826 - RNA, 60 nt, synthetic construct
  source 1..60: mol_type = other RNA
cgccggtagaccaccttctccgacaggtcctgccatttcaccaggaacatgtaaacctgg

SEQ ID NO: 24827 - RNA, 60 nt, synthetic construct
  source 1..60: mol_type = other RNA
cgccggtagaccaccttctccgacaggtcctgccatttcaccaggaacatgtacacctgg

SEQ ID NO: 24828 - RNA, 60 nt, synthetic construct
  source 1..60: mol_type = other RNA
cgccggtagaccaccttctccgacaggtcctgccatttcaccaggaacatgtagacctgg

SEQ ID NO: 24829 - RNA, 60 nt, synthetic construct
  source 1..60: mol_type = other RNA
cgccggtagaccaccttctccgacaggtcctgccatttcaccaggaacatgtatacctgg

SEQ ID NO: 24830 - RNA, 61 nt, synthetic construct
  source 1..61: mol_type = other RNA
gcgccggtagaccaccttctccgacaggtcctgccatttcaccaggaacatgtacacctgg

SEQ ID NO: 24831 - RNA, 61 nt, synthetic construct
  source 1..61: mol_type = other RNA
gcgccggtagaccaccttctccgacaggtcctgccatttcaccaggaacatgtaaacctgg

SEQ ID NO: 24832 - RNA, 61 nt, synthetic construct
  source 1..61: mol_type = other RNA
gcgccggtagaccaccttctccgacaggtcctgccatttcaccaggaacatgtagacctgg

SEQ ID NO: 24833 - RNA, 61 nt, synthetic construct
  source 1..61: mol_type = other RNA
gcgccggtagaccaccttctccgacaggtcctgccatttcaccaggaacatgtatacctgg

SEQ ID NO: 24834 - RNA, 62 nt, synthetic construct
  source 1..62: mol_type = other RNA
agcgccggtagaccaccttctccgacaggtcctgccatttcaccaggaacatgtaaacctgg

SEQ ID NO: 24835 - RNA, 62 nt, synthetic construct
  source 1..62: mol_type = other RNA
agcgccggtagaccaccttctccgacaggtcctgccatttcaccaggaacatgtacacctgg

SEQ ID NO: 24836 - RNA, 62 nt, synthetic construct
  source 1..62: mol_type = other RNA
agcgccggtagaccaccttctccgacaggtcctgccatttcaccaggaacatgtagacctgg

SEQ ID NO: 24837 - RNA, 62 nt, synthetic construct
  source 1..62: mol_type = other RNA
agcgccggtagaccaccttctccgacaggtcctgccatttcaccaggaacatgtatacctgg

SEQ ID NO: 24838 - RNA, 63 nt, synthetic construct
  source 1..63: mol_type = other RNA
aagcgccggtagaccaccttctccgacaggtcctgccatttcaccaggaacatgtagacctgg

SEQ ID NO: 24839 - RNA, 63 nt, synthetic construct
  source 1..63: mol_type = other RNA
aagcgccggtagaccaccttctccgacaggtcctgccatttcaccaggaacatgtaaacctgg

SEQ ID NO: 24840 - RNA, 63 nt, synthetic construct
  source 1..63: mol_type = other RNA
aagcgccggtagaccaccttctccgacaggtcctgccatttcaccaggaacatgtatacctgg

SEQ ID NO: 24841 - RNA, 63 nt, synthetic construct
  source 1..63: mol_type = other RNA
aagcgccggtagaccaccttctccgacaggtcctgccatttcaccaggaacatgtacacctgg

SEQ ID NO: 24842 - RNA, 64 nt, synthetic construct
  source 1..64: mol_type = other RNA
gaagcgccggtagaccaccttctccgacaggtcctgccatttcaccaggaacatgtacacctgg

SEQ ID NO: 24843 - RNA, 64 nt, synthetic construct
  source 1..64: mol_type = other RNA
gaagcgccggtagaccaccttctccgacaggtcctgccatttcaccaggaacatgtatacctgg

SEQ ID NO: 24844 - RNA, 64 nt, synthetic construct
  source 1..64: mol_type = other RNA
gaagcgccggtagaccaccttctccgacaggtcctgccatttcaccaggaacatgtaaacctgg

SEQ ID NO: 24845 - RNA, 64 nt, synthetic construct
  source 1..64: mol_type = other RNA
gaagcgccggtagaccaccttctccgacaggtcctgccatttcaccaggaacatgtagacctgg

SEQ ID NO: 24846 - RNA, 65 nt, synthetic construct
  source 1..65: mol_type = other RNA
tgaagcgccggtagaccaccttctccgacaggtcctgccatttcaccaggaacatgtagacctgg

SEQ ID NO: 24847 - RNA, 65 nt, synthetic construct
  source 1..65: mol_type = other RNA
tgaagcgccggtagaccaccttctccgacaggtcctgccatttcaccaggaacatgtacacctgg

SEQ ID NO: 24848 - RNA, 65 nt, synthetic construct
  source 1..65: mol_type = other RNA
tgaagcgccggtagaccaccttctccgacaggtcctgccatttcaccaggaacatgtaaacctgg

SEQ ID NO: 24849 - RNA, 65 nt, synthetic construct
  source 1..65: mol_type = other RNA
tgaagcgccggtagaccaccttctccgacaggtcctgccatttcaccaggaacatgtatacctgg

SEQ ID NO: 24850 - RNA, 66 nt, synthetic construct
  source 1..66: mol_type = other RNA
gtgaagcgccggtagaccaccttctccgacaggtcctgccatttcaccaggaacatgtacacctgg

SEQ ID NO: 24851 - RNA, 66 nt, synthetic construct
  source 1..66: mol_type = other RNA
gtgaagcgccggtagaccaccttctccgacaggtcctgccatttcaccaggaacatgtatacctgg

SEQ ID NO: 24852 - RNA, 66 nt, synthetic construct
  source 1..66: mol_type = other RNA
gtgaagcgccggtagaccaccttctccgacaggtcctgccatttcaccaggaacatgtagacctgg

SEQ ID NO: 24853 - RNA, 66 nt, synthetic construct
  source 1..66: mol_type = other RNA
gtgaagcgccggtagaccaccttctccgacaggtcctgccatttcaccaggaacatgtaaacctgg

SEQ ID NO: 24854 - RNA, 67 nt, synthetic construct
  source 1..67: mol_type = other RNA
ggtgaagcgccggtagaccaccttctccgacaggtcctgccatttcaccaggaacatgtacacctgg

SEQ ID NO: 24855 - RNA, 67 nt, synthetic construct
  source 1..67: mol_type = other RNA
ggtgaagcgccggtagaccaccttctccgacaggtcctgccatttcaccaggaacatgtagacctgg

SEQ ID NO: 24856 - RNA, 67 nt, synthetic construct
  source 1..67: mol_type = other RNA
ggtgaagcgccggtagaccaccttctccgacaggtcctgccatttcaccaggaacatgtatacctgg

SEQ ID NO: 24857 - RNA, 67 nt, synthetic construct
  source 1..67: mol_type = other RNA
ggtgaagcgccggtagaccaccttctccgacaggtcctgccatttcaccaggaacatgtaaacctgg

SEQ ID NO: 24858 - RNA, 68 nt, synthetic construct
  source 1..68: mol_type = other RNA
cggtgaagcgccggtagaccaccttctccgacaggtcctgccatttcaccaggaacatgtaaacctgg

SEQ ID NO: 24859 - RNA, 68 nt, synthetic construct
  source 1..68: mol_type = other RNA
cggtgaagcgccggtagaccaccttctccgacaggtcctgccatttcaccaggaacatgtagacctgg

SEQ ID NO: 24860 - RNA, 68 nt, synthetic construct
  source 1..68: mol_type = other RNA
cggtgaagcgccggtagaccaccttctccgacaggtcctgccatttcaccaggaacatgtatacctgg

SEQ ID NO: 24861 - RNA, 68 nt, synthetic construct
  source 1..68: mol_type = other RNA
cggtgaagcgccggtagaccaccttctccgacaggtcctgccatttcaccaggaacatgtacacctgg

SEQ ID NO: 24862 - RNA, 69 nt, synthetic construct
  source 1..69: mol_type = other RNA
tcggtgaagcgccggtagaccaccttctccgacaggtcctgccatttcaccaggaacatgtatacctgg

SEQ ID NO: 24863 - RNA, 69 nt, synthetic construct
  source 1..69: mol_type = other RNA
tcggtgaagcgccggtagaccaccttctccgacaggtcctgccatttcaccaggaacatgtaaacctgg

SEQ ID NO: 24864 - RNA, 69 nt, synthetic construct
  source 1..69: mol_type = other RNA
tcggtgaagcgccggtagaccaccttctccgacaggtcctgccatttcaccaggaacatgtacacctgg

SEQ ID NO: 24865 - RNA, 69 nt, synthetic construct
  source 1..69: mol_type = other RNA
tcggtgaagcgccggtagaccaccttctccgacaggtcctgccatttcaccaggaacatgtagacctgg

SEQ ID NO: 24866 - RNA, 70 nt, synthetic construct
  source 1..70: mol_type = other RNA
ctcggtgaagcgccggtagaccaccttctccgacaggtcctgccatttcaccaggaacatgtaaacctgg

SEQ ID NO: 24867 - RNA, 70 nt, synthetic construct
  source 1..70: mol_type = other RNA
ctcggtgaagcgccggtagaccaccttctccgacaggtcctgccatttcaccaggaacatgtacacctgg

SEQ ID NO: 24868 - RNA, 70 nt, synthetic construct
  source 1..70: mol_type = other RNA
ctcggtgaagcgccggtagaccaccttctccgacaggtcctgccatttcaccaggaacatgtatacctgg

SEQ ID NO: 24869 - RNA, 70 nt, synthetic construct
  source 1..70: mol_type = other RNA
ctcggtgaagcgccggtagaccaccttctccgacaggtcctgccatttcaccaggaacatgtagacctgg

SEQ ID NO: 24870 - RNA, 71 nt, synthetic construct
  source 1..71: mol_type = other RNA
tctcggtgaagcgccggtagaccaccttctccgacaggtcctgccatttcaccaggaacatgtagacctgg

SEQ ID NO: 24871 - RNA, 71 nt, synthetic construct
  source 1..71: mol_type = other RNA
tctcggtgaagcgccggtagaccaccttctccgacaggtcctgccatttcaccaggaacatgtaaacctgg

SEQ ID NO: 24872 - RNA, 71 nt, synthetic construct
  source 1..71: mol_type = other RNA
tctcggtgaagcgccggtagaccaccttctccgacaggtcctgccatttcaccaggaacatgtatacctgg

SEQ ID NO: 24873 - RNA, 71 nt, synthetic construct
  source 1..71: mol_type = other RNA
tctcggtgaagcgccggtagaccaccttctccgacaggtcctgccatttcaccaggaacatgtacacctgg

SEQ ID NO: 24874 - RNA, 72 nt, synthetic construct
  source 1..72: mol_type = other RNA
atctcggtgaagcgccggtagaccaccttctccgacaggtcctgccatttcaccaggaacatgtatacctgg

SEQ ID NO: 24875 - RNA, 72 nt, synthetic construct
  source 1..72: mol_type = other RNA
atctcggtgaagcgccggtagaccaccttctccgacaggtcctgccatttcaccaggaacatgtagacctgg

SEQ ID NO: 24876 - RNA, 72 nt, synthetic construct
  source 1..72: mol_type = other RNA
atctcggtgaagcgccggtagaccaccttctccgacaggtcctgccatttcaccaggaacatgtacacctgg

SEQ ID NO: 24877 - RNA, 72 nt, synthetic construct
  source 1..72: mol_type = other RNA
atctcggtgaagcgccggtagaccaccttctccgacaggtcctgccatttcaccaggaacatgtaaacctgg

SEQ ID NO: 24878 - RNA, 73 nt, synthetic construct
  source 1..73: mol_type = other RNA
gatctcggtgaagcgccggtagaccaccttctccgacaggtcctgccatttcaccaggaacatgtagacctgg

SEQ ID NO: 24879 - RNA, 73 nt, synthetic construct
  source 1..73: mol_type = other RNA
gatctcggtgaagcgccggtagaccaccttctccgacaggtcctgccatttcaccaggaacatgtacacctgg

SEQ ID NO: 24880 - RNA, 73 nt, synthetic construct
  source 1..73: mol_type = other RNA
gatctcggtgaagcgccggtagaccaccttctccgacaggtcctgccatttcaccaggaacatgtaaacctgg

SEQ ID NO: 24881 - RNA, 73 nt, synthetic construct
  source 1..73: mol_type = other RNA
gatctcggtgaagcgccggtagaccaccttctccgacaggtcctgccatttcaccaggaacatgtatacctgg

SEQ ID NO: 24882 - RNA, 74 nt, synthetic construct
  source 1..74: mol_type = other RNA
agatctcggtgaagcgccggtagaccaccttctccgacaggtcctgccatttcaccaggaacatgtatacctgg

SEQ ID NO: 24883 - RNA, 74 nt, synthetic construct
  source 1..74: mol_type = other RNA
agatctcggtgaagcgccggtagaccaccttctccgacaggtcctgccatttcaccaggaacatgtaaacctgg

SEQ ID NO: 24884 - RNA, 74 nt, synthetic construct
  source 1..74: mol_type = other RNA
agatctcggtgaagcgccggtagaccaccttctccgacaggtcctgccatttcaccaggaacatgtacacctgg

SEQ ID NO: 24885 - RNA, 74 nt, synthetic construct
  source 1..74: mol_type = other RNA
agatctcggtgaagcgccggtagaccaccttctccgacaggtcctgccatttcaccaggaacatgtagacctgg

SEQ ID NO: 24886 - RNA, 75 nt, synthetic construct
  source 1..75: mol_type = other RNA
tagatctcggtgaagcgccggtagaccaccttctccgacaggtcctgccatttcaccaggaacatgtacacctgg

SEQ ID NO: 24887 - RNA, 75 nt, synthetic construct
  source 1..75: mol_type = other RNA
tagatctcggtgaagcgccggtagaccaccttctccgacaggtcctgccatttcaccaggaacatgtagacctgg

SEQ ID NO: 24888 - RNA, 75 nt, synthetic construct
  source 1..75: mol_type = other RNA
tagatctcggtgaagcgccggtagaccaccttctccgacaggtcctgccatttcaccaggaacatgtatacctgg

SEQ ID NO: 24889 - RNA, 75 nt, synthetic construct
  source 1..75: mol_type = other RNA
tagatctcggtgaagcgccggtagaccaccttctccgacaggtcctgccatttcaccaggaacatgtaaacctgg

SEQ ID NO: 24890 - RNA, 76 nt, synthetic construct
  source 1..76: mol_type = other RNA
gtagatctcggtgaagcgccggtagaccaccttctccgacaggtcctgccatttcaccaggaacatgtatacctgg

SEQ ID NO: 24891 - RNA, 76 nt, synthetic construct
  source 1..76: mol_type = other RNA
gtagatctcggtgaagcgccggtagaccaccttctccgacaggtcctgccatttcaccaggaacatgtagacctgg

SEQ ID NO: 24892 - RNA, 76 nt, synthetic construct
  source 1..76: mol_type = other RNA
gtagatctcggtgaagcgccggtagaccaccttctccgacaggtcctgccatttcaccaggaacatgtacacctgg

SEQ ID NO: 24893 - RNA, 76 nt, synthetic construct
  source 1..76: mol_type = other RNA
gtagatctcggtgaagcgccggtagaccaccttctccgacaggtcctgccatttcaccaggaacatgtaaacctgg

SEQ ID NO: 24894 - RNA, 77 nt, synthetic construct
  source 1..77: mol_type = other RNA
cgtagatctcggtgaagcgccggtagaccaccttctccgacaggtcctgccatttcaccaggaacatgtatacctgg

SEQ ID NO: 24895 - RNA, 77 nt, synthetic construct
  source 1..77: mol_type = other RNA
cgtagatctcggtgaagcgccggtagaccaccttctccgacaggtcctgccatttcaccaggaacatgtaaacctgg

SEQ ID NO: 24896 - RNA, 77 nt, synthetic construct
  source 1..77: mol_type = other RNA
cgtagatctcggtgaagcgccggtagaccaccttctccgacaggtcctgccatttcaccaggaacatgtacacctgg

SEQ ID NO: 24897 - RNA, 77 nt, synthetic construct
  source 1..77: mol_type = other RNA
cgtagatctcggtgaagcgccggtagaccaccttctccgacaggtcctgccatttcaccaggaacatgtagacctgg

SEQ ID NO: 24898 - RNA, 78 nt, synthetic construct
  source 1..78: mol_type = other RNA
tcgtagatctcggtgaagcgccggtagaccaccttctccgacaggtcctgccatttcaccaggaacatgtagacctgg

SEQ ID NO: 24899 - RNA, 78 nt, synthetic construct
  source 1..78: mol_type = other RNA
tcgtagatctcggtgaagcgccggtagaccaccttctccgacaggtcctgccatttcaccaggaacatgtatacctgg

SEQ ID NO: 24900 - RNA, 78 nt, synthetic construct
  source 1..78: mol_type = other RNA
tcgtagatctcggtgaagcgccggtagaccaccttctccgacaggtcctgccatttcaccaggaacatgtacacctgg

SEQ ID NO: 24901 - RNA, 78 nt, synthetic construct
  source 1..78: mol_type = other RNA
tcgtagatctcggtgaagcgccggtagaccaccttctccgacaggtcctgccatttcaccaggaacatgtaaacctgg

SEQ ID NO: 24902 - RNA, 79 nt, synthetic construct
  source 1..79: mol_type = other RNA
ctcgtagatctcggtgaagcgccggtagaccaccttctccgacaggtcctgccatttcaccaggaacatgtacacctgg

SEQ ID NO: 24903 - RNA, 79 nt, synthetic construct
  source 1..79: mol_type = other RNA
ctcgtagatctcggtgaagcgccggtagaccaccttctccgacaggtcctgccatttcaccaggaacatgtatacctgg

SEQ ID NO: 24904 - RNA, 79 nt, synthetic construct
  source 1..79: mol_type = other RNA
ctcgtagatctcggtgaagcgccggtagaccaccttctccgacaggtcctgccatttcaccaggaacatgtagacctgg

SEQ ID NO: 24905 - RNA, 79 nt, synthetic construct
  source 1..79: mol_type = other RNA
ctcgtagatctcggtgaagcgccggtagaccaccttctccgacaggtcctgccatttcaccaggaacatgtaaacctgg

SEQ ID NO: 24906 - RNA, 80 nt, synthetic construct
  source 1..80: mol_type = other RNA
actcgtagatctcggtgaagcgccggtagaccaccttctccgacaggtcctgccatttcaccaggaacatgtaaacctgg

SEQ ID NO: 24907 - RNA, 80 nt, synthetic construct
  source 1..80: mol_type = other RNA
actcgtagatctcggtgaagcgccggtagaccaccttctccgacaggtcctgccatttcaccaggaacatgtacacctgg

SEQ ID NO: 24908 - RNA, 80 nt, synthetic construct
  source 1..80: mol_type = other RNA
actcgtagatctcggtgaagcgccggtagaccaccttctccgacaggtcctgccatttcaccaggaacatgtatacctgg

SEQ ID NO: 24909 - RNA, 80 nt, synthetic construct
  source 1..80: mol_type = other RNA
actcgtagatctcggtgaagcgccggtagaccaccttctccgacaggtcctgccatttcaccaggaacatgtagacctgg

SEQ ID NO: 24910 - RNA, 81 nt, synthetic construct
  source 1..81: mol_type = other RNA
aactcgtagatctcggtgaagcgccggtagaccaccttctccgacaggtcctgccatttcaccaggaacatgtaaacctgg

SEQ ID NO: 24911 - RNA, 81 nt, synthetic construct
  source 1..81: mol_type = other RNA
aactcgtagatctcggtgaagcgccggtagaccaccttctccgacaggtcctgccatttcaccaggaacatgtatacctgg

SEQ ID NO: 24912 - RNA, 81 nt, synthetic construct
  source 1..81: mol_type = other RNA
aactcgtagatctcggtgaagcgccggtagaccaccttctccgacaggtcctgccatttcaccaggaacatgtacacctgg

SEQ ID NO: 24913 - RNA, 81 nt, synthetic construct
  source 1..81: mol_type = other RNA
aactcgtagatctcggtgaagcgccggtagaccaccttctccgacaggtcctgccatttcaccaggaacatgtagacctgg

SEQ ID NO: 24914 - RNA, 82 nt, synthetic construct
  source 1..82: mol_type = other RNA
gaactcgtagatctcggtgaagcgccggtagaccaccttctccgacaggtcctgccatttcaccaggaacatgtaaacctgg

SEQ ID NO: 24915 - RNA, 82 nt, synthetic construct
  source 1..82: mol_type = other RNA
gaactcgtagatctcggtgaagcgccggtagaccaccttctccgacaggtcctgccatttcaccaggaacatgtacacctgg

SEQ ID NO: 24916 - RNA, 82 nt, synthetic construct
  source 1..82: mol_type = other RNA
gaactcgtagatctcggtgaagcgccggtagaccaccttctccgacaggtcctgccatttcaccaggaacatgtagacctgg

SEQ ID NO: 24917 - RNA, 82 nt, synthetic construct
  source 1..82: mol_type = other RNA
gaactcgtagatctcggtgaagcgccggtagaccaccttctccgacaggtcctgccatttcaccaggaacatgtatacctgg

SEQ ID NO: 24918 - RNA, 83 nt, synthetic construct
  source 1..83: mol_type = other RNA
ggaactcgtagatctcggtgaagcgccggtagaccaccttctccgacaggtcctgccatttcaccaggaacatgtagacctgg

SEQ ID NO: 24919 - RNA, 83 nt, synthetic construct
  source 1..83: mol_type = other RNA
ggaactcgtagatctcggtgaagcgccggtagaccaccttctccgacaggtcctgccatttcaccaggaacatgtacacctgg

SEQ ID NO: 24920 - RNA, 83 nt, synthetic construct
  source 1..83: mol_type = other RNA
ggaactcgtagatctcggtgaagcgccggtagaccaccttctccgacaggtcctgccatttcaccaggaacatgtatacctgg

SEQ ID NO: 24921 - RNA, 83 nt, synthetic construct
  source 1..83: mol_type = other RNA
ggaactcgtagatctcggtgaagcgccggtagaccaccttctccgacaggtcctgccatttcaccaggaacatgtaaacctgg

SEQ ID NO: 24922 - RNA, 84 nt, synthetic construct
  source 1..84: mol_type = other RNA
tggaactcgtagatctcggtgaagcgccggtagaccaccttctccgacaggtcctgccatttcaccaggaacatgtagacctgg

SEQ ID NO: 24923 - RNA, 84 nt, synthetic construct
  source 1..84: mol_type = other RNA
tggaactcgtagatctcggtgaagcgccggtagaccaccttctccgacaggtcctgccatttcaccaggaacatgtaaacctgg

SEQ ID NO: 24924 - RNA, 84 nt, synthetic construct
  source 1..84: mol_type = other RNA
tggaactcgtagatctcggtgaagcgccggtagaccaccttctccgacaggtcctgccatttcaccaggaacatgtatacctgg

SEQ ID NO: 24925 - RNA, 84 nt, synthetic construct
  source 1..84: mol_type = other RNA
tggaactcgtagatctcggtgaagcgccggtagaccaccttctccgacaggtcctgccatttcaccaggaacatgtacacctgg

SEQ ID NO: 24926 - RNA, 85 nt, synthetic construct
  source 1..85: mol_type = other RNA
atggaactcgtagatctcggtgaagcgccggtagaccaccttctccgacaggtcctgccatttcaccaggaacatgtagacctgg

SEQ ID NO: 24927 - RNA, 85 nt, synthetic construct
  source 1..85: mol_type = other RNA
atggaactcgtagatctcggtgaagcgccggtagaccaccttctccgacaggtcctgccatttcaccaggaacatgtatacctgg

SEQ ID NO: 24928 - RNA, 85 nt, synthetic construct
  source 1..85: mol_type = other RNA
atggaactcgtagatctcggtgaagcgccggtagaccaccttctccgacaggtcctgccatttcaccaggaacatgtacacctgg

SEQ ID NO: 24929 - RNA, 85 nt, synthetic construct
  source 1..85: mol_type = other RNA
atggaactcgtagatctcggtgaagcgccggtagaccaccttctccgacaggtcctgccatttcaccaggaacatgtaaacctgg

SEQ ID NO: 24930 - RNA, 86 nt, synthetic construct
  source 1..86: mol_type = other RNA
catggaactcgtagatctcggtgaagcgccggtagaccaccttctccgacaggtcctgccatttcaccaggaacatgtagacctgg

SEQ ID NO: 24931 - RNA, 86 nt, synthetic construct
  source 1..86: mol_type = other RNA
catggaactcgtagatctcggtgaagcgccggtagaccaccttctccgacaggtcctgccatttcaccaggaacatgtacacctgg

SEQ ID NO: 24932 - RNA, 86 nt, synthetic construct
  source 1..86: mol_type = other RNA
catggaactcgtagatctcggtgaagcgccggtagaccaccttctccgacaggtcctgccatttcaccaggaacatgtaaacctgg

SEQ ID NO: 24933 - RNA, 86 nt, synthetic construct
  source 1..86: mol_type = other RNA
catggaactcgtagatctcggtgaagcgccggtagaccaccttctccgacaggtcctgccatttcaccaggaacatgtatacctgg

SEQ ID NO: 24934 - RNA, 87 nt, synthetic construct
  source 1..87: mol_type = other RNA
acatggaactcgtagatctcggtgaagcgccggtagaccaccttctccgacaggtcctgccatttcaccaggaacatgtacacctgg

SEQ ID NO: 24935 - RNA, 87 nt, synthetic construct
  source 1..87: mol_type = other RNA
acatggaactcgtagatctcggtgaagcgccggtagaccaccttctccgacaggtcctgccatttcaccaggaacatgtagacctgg

SEQ ID NO: 24936 - RNA, 87 nt, synthetic construct
  source 1..87: mol_type = other RNA
acatggaactcgtagatctcggtgaagcgccggtagaccaccttctccgacaggtcctgccatttcaccaggaacatgtaaacctgg

SEQ ID NO: 24937 - RNA, 87 nt, synthetic construct
  source 1..87: mol_type = other RNA
acatggaactcgtagatctcggtgaagcgccggtagaccaccttctccgacaggtcctgccatttcaccaggaacatgtatacctgg

SEQ ID NO: 24938 - RNA, 88 nt, synthetic construct
  source 1..88: mol_type = other RNA
cacatggaactcgtagatctcggtgaagcgccggtagaccaccttctccgacaggtcctgccatttcaccaggaacatgtagacctgg

SEQ ID NO: 24939 - RNA, 88 nt, synthetic construct
  source 1..88: mol_type = other RNA
cacatggaactcgtagatctcggtgaagcgccggtagaccaccttctccgacaggtcctgccatttcaccaggaacatgtacacctgg

SEQ ID NO: 24940 - RNA, 88 nt, synthetic construct
  source 1..88: mol_type = other RNA
cacatggaactcgtagatctcggtgaagcgccggtagaccaccttctccgacaggtcctgccatttcaccaggaacatgtaaacctgg

SEQ ID NO: 24941 - RNA, 88 nt, synthetic construct
  source 1..88: mol_type = other RNA
cacatggaactcgtagatctcggtgaagcgccggtagaccaccttctccgacaggtcctgccatttcaccaggaacatgtatacctgg

SEQ ID NO: 24942 - RNA, 89 nt, synthetic construct
  source 1..89: mol_type = other RNA
tcacatggaactcgtagatctcggtgaagcgccggtagaccaccttctccgacaggtcctgccatttcaccaggaacatgtaaacctgg

SEQ ID NO: 24943 - RNA, 89 nt, synthetic construct
  source 1..89: mol_type = other RNA
tcacatggaactcgtagatctcggtgaagcgccggtagaccaccttctccgacaggtcctgccatttcaccaggaacatgtacacctgg

SEQ ID NO: 24944 - RNA, 89 nt, synthetic construct
  source 1..89: mol_type = other RNA
tcacatggaactcgtagatctcggtgaagcgccggtagaccaccttctccgacaggtcctgccatttcaccaggaacatgtagacctgg

SEQ ID NO: 24945 - RNA, 89 nt, synthetic construct
  source 1..89: mol_type = other RNA
tcacatggaactcgtagatctcggtgaagcgccggtagaccaccttctccgacaggtcctgccatttcaccaggaacatgtatacctgg

SEQ ID NO: 24946 - RNA, 90 nt, synthetic construct
  source 1..90: mol_type = other RNA
ctcacatggaactcgtagatctcggtgaagcgccggtagaccaccttctccgacaggtcctgccatttcaccaggaacatgtacacctgg

SEQ ID NO: 24947 - RNA, 90 nt, synthetic construct
  source 1..90: mol_type = other RNA
ctcacatggaactcgtagatctcggtgaagcgccggtagaccaccttctccgacaggtcctgccatttcaccaggaacatgtaaacctgg

SEQ ID NO: 24948 - RNA, 90 nt, synthetic construct
  source 1..90: mol_type = other RNA
ctcacatggaactcgtagatctcggtgaagcgccggtagaccaccttctccgacaggtcctgccatttcaccaggaacatgtagacctgg

SEQ ID NO: 24949 - RNA, 90 nt, synthetic construct
  source 1..90: mol_type = other RNA
ctcacatggaactcgtagatctcggtgaagcgccggtagaccaccttctccgacaggtcctgccatttcaccaggaacatgtatacctgg

SEQ ID NO: 24950 - RNA, 91 nt, synthetic construct
  source 1..91: mol_type = other RNA
actcacatggaactcgtagatctcggtgaagcgccggtagaccaccttctccgacaggtcctgccatttcaccaggaacatgtaaacctgg

SEQ ID NO: 24951 - RNA, 91 nt, synthetic construct
  source 1..91: mol_type = other RNA
actcacatggaactcgtagatctcggtgaagcgccggtagaccaccttctccgacaggtcctgccatttcaccaggaacatgtagacctgg

SEQ ID NO: 24952 - RNA, 91 nt, synthetic construct
  source 1..91: mol_type = other RNA
actcacatggaactcgtagatctcggtgaagcgccggtagaccaccttctccgacaggtcctgccatttcaccaggaacatgtacacctgg

SEQ ID NO: 24953 - RNA, 91 nt, synthetic construct
  source 1..91: mol_type = other RNA
actcacatggaactcgtagatctcggtgaagcgccggtagaccaccttctccgacaggtcctgccatttcaccaggaacatgtatacctgg

SEQ ID NO: 24954 - RNA, 92 nt, synthetic construct
  source 1..92: mol_type = other RNA
cactcacatggaactcgtagatctcggtgaagcgccggtagaccaccttctccgacaggtcctgccatttcaccaggaacatgtagacctgg

SEQ ID NO: 24955 - RNA, 92 nt, synthetic construct
  source 1..92: mol_type = other RNA
cactcacatggaactcgtagatctcggtgaagcgccggtagaccaccttctccgacaggtcctgccatttcaccaggaacatgtacacctgg

SEQ ID NO: 24956 - RNA, 92 nt, synthetic construct
  source 1..92: mol_type = other RNA
cactcacatggaactcgtagatctcggtgaagcgccggtagaccaccttctccgacaggtcctgccatttcaccaggaacatgtaaacctgg

SEQ ID NO: 24957 - RNA, 92 nt, synthetic construct
  source 1..92: mol_type = other RNA
cactcacatggaactcgtagatctcggtgaagcgccggtagaccaccttctccgacaggtcctgccatttcaccaggaacatgtatacctgg

SEQ ID NO: 24958 - RNA, 93 nt, synthetic construct
  source 1..93: mol_type = other RNA
acactcacatggaactcgtagatctcggtgaagcgccggtagaccaccttctccgacaggtcctgccatttcaccaggaacatgtatacctgg

SEQ ID NO: 24959 - RNA, 93 nt, synthetic construct
  source 1..93: mol_type = other RNA
acactcacatggaactcgtagatctcggtgaagcgccggtagaccaccttctccgacaggtcctgccatttcaccaggaacatgtacacctgg

SEQ ID NO: 24960 - RNA, 93 nt, synthetic construct
  source 1..93: mol_type = other RNA
acactcacatggaactcgtagatctcggtgaagcgccggtagaccaccttctccgacaggtcctgccatttcaccaggaacatgtagacctgg

SEQ ID NO: 24961 - RNA, 93 nt, synthetic construct
  source 1..93: mol_type = other RNA
acactcacatggaactcgtagatctcggtgaagcgccggtagaccaccttctccgacaggtcctgccatttcaccaggaacatgtaaacctgg

SEQ ID NO: 24962 - RNA, 94 nt, synthetic construct
  source 1..94: mol_type = other RNA
cacactcacatggaactcgtagatctcggtgaagcgccggtagaccaccttctccgacaggtcctgccatttcaccaggaacatgtagacctgg

SEQ ID NO: 24963 - RNA, 94 nt, synthetic construct
  source 1..94: mol_type = other RNA
cacactcacatggaactcgtagatctcggtgaagcgccggtagaccaccttctccgacaggtcctgccatttcaccaggaacatgtatacctgg

SEQ ID NO: 24964 - RNA, 94 nt, synthetic construct
  source 1..94: mol_type = other RNA
cacactcacatggaactcgtagatctcggtgaagcgccggtagaccaccttctccgacaggtcctgccatttcaccaggaacatgtaaacctgg

SEQ ID NO: 24965 - RNA, 94 nt, synthetic construct
  source 1..94: mol_type = other RNA
cacactcacatggaactcgtagatctcggtgaagcgccggtagaccaccttctccgacaggtcctgccatttcaccaggaacatgtacacctgg

SEQ ID NO: 24966 - RNA, 95 nt, synthetic construct
  source 1..95: mol_type = other RNA
ccacactcacatggaactcgtagatctcggtgaagcgccggtagaccaccttctccgacaggtcctgccatttcaccaggaacatgtatacctgg

SEQ ID NO: 24967 - RNA, 95 nt, synthetic construct
  source 1..95: mol_type = other RNA
ccacactcacatggaactcgtagatctcggtgaagcgccggtagaccaccttctccgacaggtcctgccatttcaccaggaacatgtacacctgg

SEQ ID NO: 24968 - RNA, 95 nt, synthetic construct
  source 1..95: mol_type = other RNA
ccacactcacatggaactcgtagatctcggtgaagcgccggtagaccaccttctccgacaggtcctgccatttcaccaggaacatgtaaacctgg

SEQ ID NO: 24969 - RNA, 95 nt, synthetic construct
  source 1..95: mol_type = other RNA
ccacactcacatggaactcgtagatctcggtgaagcgccggtagaccaccttctccgacaggtcctgccatttcaccaggaacatgtagacctgg

SEQ ID NO: 24970 - RNA, 96 nt, synthetic construct
  source 1..96: mol_type = other RNA
cccacactcacatggaactcgtagatctcggtgaagcgccggtagaccaccttctccgacaggtcctgccatttcaccaggaacatgtatacctgg

SEQ ID NO: 24971 - RNA, 96 nt, synthetic construct
  source 1..96: mol_type = other RNA
cccacactcacatggaactcgtagatctcggtgaagcgccggtagaccaccttctccgacaggtcctgccatttcaccaggaacatgtacacctgg

SEQ ID NO: 24972 - RNA, 96 nt, synthetic construct
  source 1..96: mol_type = other RNA
cccacactcacatggaactcgtagatctcggtgaagcgccggtagaccaccttctccgacaggtcctgccatttcaccaggaacatgtagacctgg

SEQ ID NO: 24973 - RNA, 96 nt, synthetic construct
  source 1..96: mol_type = other RNA
cccacactcacatggaactcgtagatctcggtgaagcgccggtagaccaccttctccgacaggtcctgccatttcaccaggaacatgtaaacctgg

SEQ ID NO: 24974 - RNA, 97 nt, synthetic construct
  source 1..97: mol_type = other RNA
ccccacactcacatggaactcgtagatctcggtgaagcgccggtagaccaccttctccgacaggtcctgccatttcaccaggaacatgtatacctgg

SEQ ID NO: 24975 - RNA, 97 nt, synthetic construct
  source 1..97: mol_type = other RNA
ccccacactcacatggaactcgtagatctcggtgaagcgccggtagaccaccttctccgacaggtcctgccatttcaccaggaacatgtagacctgg

SEQ ID NO: 24976 - RNA, 97 nt, synthetic construct
  source 1..97: mol_type = other RNA
ccccacactcacatggaactcgtagatctcggtgaagcgccggtagaccaccttctccgacaggtcctgccatttcaccaggaacatgtacacctgg

SEQ ID NO: 24977 - RNA, 97 nt, synthetic construct
  source 1..97: mol_type = other RNA
ccccacactcacatggaactcgtagatctcggtgaagcgccggtagaccaccttctccgacaggtcctgccatttcaccaggaacatgtaaacctgg

SEQ ID NO: 24978 - RNA, 98 nt, synthetic construct
  source 1..98: mol_type = other RNA
tccccacactcacatggaactcgtagatctcggtgaagcgccggtagaccaccttctccgacaggtcctgccatttcaccaggaacatgtatacctgg

SEQ ID NO: 24979 - RNA, 98 nt, synthetic construct
  source 1..98: mol_type = other RNA
tccccacactcacatggaactcgtagatctcggtgaagcgccggtagaccaccttctccgacaggtcctgccatttcaccaggaacatgtagacctgg

SEQ ID NO: 24980 - RNA, 98 nt, synthetic construct
  source 1..98: mol_type = other RNA
tccccacactcacatggaactcgtagatctcggtgaagcgccggtagaccaccttctccgacaggtcctgccatttcaccaggaacatgtacacctgg

SEQ ID NO: 24981 - RNA, 98 nt, synthetic construct
  source 1..98: mol_type = other RNA
tccccacactcacatggaactcgtagatctcggtgaagcgccggtagaccaccttctccgacaggtcctgccatttcaccaggaacatgtaaacctgg

SEQ ID NO: 24982 - RNA, 99 nt, synthetic construct
  source 1..99: mol_type = other RNA
atccccacactcacatggaactcgtagatctcggtgaagcgccggtagaccaccttctccgacaggtcctgccatttcaccaggaacatgtacacctgg

SEQ ID NO: 24983 - RNA, 99 nt, synthetic construct
  source 1..99: mol_type = other RNA
atccccacactcacatggaactcgtagatctcggtgaagcgccggtagaccaccttctccgacaggtcctgccatttcaccaggaacatgtagacctgg

SEQ ID NO: 24984 - RNA, 99 nt, synthetic construct
  source 1..99: mol_type = other RNA
atccccacactcacatggaactcgtagatctcggtgaagcgccggtagaccaccttctccgacaggtcctgccatttcaccaggaacatgtatacctgg

SEQ ID NO: 24985 - RNA, 99 nt, synthetic construct
  source 1..99: mol_type = other RNA
atccccacactcacatggaactcgtagatctcggtgaagcgccggtagaccaccttctccgacaggtcctgccatttcaccaggaacatgtaaacctgg

SEQ ID NO: 24986 - RNA, 100 nt, synthetic construct
  source 1..100: mol_type = other RNA
catccccacactcacatggaactcgtagatctcggtgaagcgccggtagaccaccttctccgacaggtcctgccatttcaccaggaacatgtaaacctgg

SEQ ID NO: 24987 - RNA, 100 nt, synthetic construct
  source 1..100: mol_type = other RNA
catccccacactcacatggaactcgtagatctcggtgaagcgccggtagaccaccttctccgacaggtcctgccatttcaccaggaacatgtatacctgg

SEQ ID NO: 24988 - RNA, 100 nt, synthetic construct
  source 1..100: mol_type = other RNA
catccccacactcacatggaactcgtagatctcggtgaagcgccggtagaccaccttctccgacaggtcctgccatttcaccaggaacatgtagacctgg

SEQ ID NO: 24989 - RNA, 100 nt, synthetic construct
  source 1..100: mol_type = other RNA
catccccacactcacatggaactcgtagatctcggtgaagcgccggtagaccaccttctccgacaggtcctgccatttcaccaggaacatgtacacctgg

SEQ ID NO: 24990 - RNA, 101 nt, synthetic construct
  source 1..101: mol_type = other RNA
ccatccccacactcacatggaactcgtagatctcggtgaagcgccggtagaccaccttctccgacaggtcctgccatttcaccaggaacatgtagacctgg

SEQ ID NO: 24991 - RNA, 101 nt, synthetic construct
  source 1..101: mol_type = other RNA
ccatccccacactcacatggaactcgtagatctcggtgaagcgccggtagaccaccttctccgacaggtcctgccatttcaccaggaacatgtaaacctgg

SEQ ID NO: 24992 - RNA, 101 nt, synthetic construct
  source 1..101: mol_type = other RNA
ccatccccacactcacatggaactcgtagatctcggtgaagcgccggtagaccaccttctccgacaggtcctgccatttcaccaggaacatgtacacctgg

SEQ ID NO: 24993 - RNA, 101 nt, synthetic construct
  source 1..101: mol_type = other RNA
ccatccccacactcacatggaactcgtagatctcggtgaagcgccggtagaccaccttctccgacaggtcctgccatttcaccaggaacatgtatacctgg

SEQ ID NO: 24994 - RNA, 102 nt, synthetic construct
  source 1..102: mol_type = other RNA
tccatccccacactcacatggaactcgtagatctcggtgaagcgccggtagaccaccttctccgacaggtcctgccatttcaccaggaacatgtagacctgg

SEQ ID NO: 24995 - RNA, 102 nt, synthetic construct
  source 1..102: mol_type = other RNA
tccatccccacactcacatggaactcgtagatctcggtgaagcgccggtagaccaccttctccgacaggtcctgccatttcaccaggaacatgtacacctgg

SEQ ID NO: 24996 - RNA, 102 nt, synthetic construct
  source 1..102: mol_type = other RNA
tccatccccacactcacatggaactcgtagatctcggtgaagcgccggtagaccaccttctccgacaggtcctgccatttcaccaggaacatgtatacctgg

SEQ ID NO: 24997 - RNA, 102 nt, synthetic construct
  source 1..102: mol_type = other RNA
tccatccccacactcacatggaactcgtagatctcggtgaagcgccggtagaccaccttctccgacaggtcctgccatttcaccaggaacatgtaaacctgg

SEQ ID NO: 24998 - RNA, 103 nt, synthetic construct
  source 1..103: mol_type = other RNA
ctccatccccacactcacatggaactcgtagatctcggtgaagcgccggtagaccaccttctccgacaggtcctgccatttcaccaggaacatgtatacctgg

SEQ ID NO: 24999 - RNA, 103 nt, synthetic construct
  source 1..103: mol_type = other RNA
ctccatccccacactcacatggaactcgtagatctcggtgaagcgccggtagaccaccttctccgacaggtcctgccatttcaccaggaacatgtaaacctgg

SEQ ID NO: 25000 - RNA, 103 nt, synthetic construct
  source 1..103: mol_type = other RNA
ctccatccccacactcacatggaactcgtagatctcggtgaagcgccggtagaccaccttctccgacaggtcctgccatttcaccaggaacatgtagacctgg

SEQ ID NO: 25001 - RNA, 103 nt, synthetic construct
  source 1..103: mol_type = other RNA
ctccatccccacactcacatggaactcgtagatctcggtgaagcgccggtagaccaccttctccgacaggtcctgccatttcaccaggaacatgtacacctgg

SEQ ID NO: 25002 - RNA, 16 nt, synthetic construct
  source 1..16: mol_type = other RNA
gggtagtgggatcctg

SEQ ID NO: 25003 - RNA, 17 nt, synthetic construct
  source 1..17: mol_type = other RNA
tgggtagtgggatcctg

SEQ ID NO: 25004 - RNA, 18 nt, synthetic construct
  source 1..18: mol_type = other RNA
gtgggtagtgggatcctg

SEQ ID NO: 25005 - RNA, 19 nt, synthetic construct
  source 1..19: mol_type = other RNA
agtgggtagtgggatcctg

SEQ ID NO: 25006 - RNA, 20 nt, synthetic construct
  source 1..20: mol_type = other RNA
cagtgggtagtgggatcctg

SEQ ID NO: 25007 - RNA, 21 nt, synthetic construct
  source 1..21: mol_type = other RNA
ccagtgggtagtgggatcctg

SEQ ID NO: 25008 - RNA, 22 nt, synthetic construct
  source 1..22: mol_type = other RNA
tccagtgggtagtgggatcctg

SEQ ID NO: 25009-25014 - skipped (6 entries)

SEQ ID NO: 25015 - RNA, 10 nt, synthetic construct
  source 1..10: mol_type = other RNA
gatcccacta

SEQ ID NO: 25016 - RNA, 11 nt, synthetic construct
  source 1..11: mol_type = other RNA
gatcccactac

SEQ ID NO: 25017 - RNA, 12 nt, synthetic construct
  source 1..12: mol_type = other RNA
gatcccactacc

SEQ ID NO: 25018 - RNA, 13 nt, synthetic construct
  source 1..13: mol_type = other RNA
gatcccactaccc

SEQ ID NO: 25019 - RNA, 14 nt, synthetic construct
  source 1..14: mol_type = other RNA
gatcccactaccca

SEQ ID NO: 25020 - RNA, 15 nt, synthetic construct
  source 1..15: mol_type = other RNA
gatcccactacccac

SEQ ID NO: 25021 - RNA, 16 nt, synthetic construct
  source 1..16: mol_type = other RNA
gatcccactacccact

SEQ ID NO: 25022 - RNA, 17 nt, synthetic construct
  source 1..17: mol_type = other RNA
gatcccactacccactg

SEQ ID NO: 25023 - RNA, 18 nt, synthetic construct
  source 1..18: mol_type = other RNA
gatcccactacccactgg

SEQ ID NO: 25024 - RNA, 19 nt, synthetic construct
  source 1..19: mol_type = other RNA
gatcccactacccactgga

SEQ ID NO: 25025 - RNA, 68 nt, synthetic construct
  source 1..68: mol_type = other RNA
acctgggggaaagccagagtcgggggaccccattcagcctccaaagaggctttgctgtgtgcacccag

SEQ ID NO: 25026 - RNA, 69 nt, synthetic construct
  source 1..69: mol_type = other RNA
aacctgggggaaagccagagtcgggggaccccattcagcctccaaagaggctttgctgtgtgcacccag

SEQ ID NO: 25027 - RNA, 69 nt, synthetic construct
  source 1..69: mol_type = other RNA
gacctgggggaaagccagagtcgggggaccccattcagcctccaaagaggctttgctgtgtgcacccag

SEQ ID NO: 25028 - RNA, 69 nt, synthetic construct
  source 1..69: mol_type = other RNA
tacctgggggaaagccagagtcgggggaccccattcagcctccaaagaggctttgctgtgtgcacccag

SEQ ID NO: 25029 - RNA, 69 nt, synthetic construct
  source 1..69: mol_type = other RNA
cacctgggggaaagccagagtcgggggaccccattcagcctccaaagaggctttgctgtgtgcacccag

SEQ ID NO: 25030 - RNA, 70 nt, synthetic construct
  source 1..70: mol_type = other RNA
agacctgggggaaagccagagtcgggggaccccattcagcctccaaagaggctttgctgtgtgcacccag

SEQ ID NO: 25031 - RNA, 70 nt, synthetic construct
  source 1..70: mol_type = other RNA
atacctgggggaaagccagagtcgggggaccccattcagcctccaaagaggctttgctgtgtgcacccag

SEQ ID NO: 25032 - RNA, 70 nt, synthetic construct
  source 1..70: mol_type = other RNA
acacctgggggaaagccagagtcgggggaccccattcagcctccaaagaggctttgctgtgtgcacccag

SEQ ID NO: 25033 - RNA, 70 nt, synthetic construct
  source 1..70: mol_type = other RNA
aaacctgggggaaagccagagtcgggggaccccattcagcctccaaagaggctttgctgtgtgcacccag

SEQ ID NO: 25034 - RNA, 71 nt, synthetic construct
  source 1..71: mol_type = other RNA
tatacctgggggaaagccagagtcgggggaccccattcagcctccaaagaggctttgctgtgtgcacccag

SEQ ID NO: 25035 - RNA, 71 nt, synthetic construct
  source 1..71: mol_type = other RNA
tagacctgggggaaagccagagtcgggggaccccattcagcctccaaagaggctttgctgtgtgcacccag

SEQ ID NO: 25036 - RNA, 71 nt, synthetic construct
  source 1..71: mol_type = other RNA
tacacctgggggaaagccagagtcgggggaccccattcagcctccaaagaggctttgctgtgtgcacccag

SEQ ID NO: 25037 - RNA, 71 nt, synthetic construct
  source 1..71: mol_type = other RNA
taaacctgggggaaagccagagtcgggggaccccattcagcctccaaagaggctttgctgtgtgcacccag

SEQ ID NO: 25038 - RNA, 72 nt, synthetic construct
  source 1..72: mol_type = other RNA
gtacacctgggggaaagccagagtcgggggaccccattcagcctccaaagaggctttgctgtgtgcacccag

SEQ ID NO: 25039 - RNA, 72 nt, synthetic construct
  source 1..72: mol_type = other RNA
gtagacctgggggaaagccagagtcgggggaccccattcagcctccaaagaggctttgctgtgtgcacccag

SEQ ID NO: 25040 - RNA, 72 nt, synthetic construct
  source 1..72: mol_type = other RNA
gtatacctgggggaaagccagagtcgggggaccccattcagcctccaaagaggctttgctgtgtgcacccag

SEQ ID NO: 25041 - RNA, 72 nt, synthetic construct
  source 1..72: mol_type = other RNA
gtaaacctgggggaaagccagagtcgggggaccccattcagcctccaaagaggctttgctgtgtgcacccag

SEQ ID NO: 25042 - RNA, 73 nt, synthetic construct
  source 1..73: mol_type = other RNA
tgtacacctgggggaaagccagagtcgggggaccccattcagcctccaaagaggctttgctgtgtgcacccag

SEQ ID NO: 25043 - RNA, 73 nt, synthetic construct
  source 1..73: mol_type = other RNA
tgtagacctgggggaaagccagagtcgggggaccccattcagcctccaaagaggctttgctgtgtgcacccag

SEQ ID NO: 25044 - RNA, 73 nt, synthetic construct
  source 1..73: mol_type = other RNA
tgtaaacctgggggaaagccagagtcgggggaccccattcagcctccaaagaggctttgctgtgtgcacccag

SEQ ID NO: 25045 - RNA, 73 nt, synthetic construct
  source 1..73: mol_type = other RNA
tgtatacctgggggaaagccagagtcgggggaccccattcagcctccaaagaggctttgctgtgtgcacccag

SEQ ID NO: 25046 - RNA, 74 nt, synthetic construct
  source 1..74: mol_type = other RNA
atgtacacctgggggaaagccagagtcgggggaccccattcagcctccaaagaggctttgctgtgtgcacccag

SEQ ID NO: 25047 - RNA, 74 nt, synthetic construct
  source 1..74: mol_type = other RNA
atgtatacctgggggaaagccagagtcgggggaccccattcagcctccaaagaggctttgctgtgtgcacccag

SEQ ID NO: 25048 - RNA, 74 nt, synthetic construct
  source 1..74: mol_type = other RNA
atgtagacctgggggaaagccagagtcgggggaccccattcagcctccaaagaggctttgctgtgtgcacccag

SEQ ID NO: 25049 - RNA, 74 nt, synthetic construct
  source 1..74: mol_type = other RNA
atgtaaacctgggggaaagccagagtcgggggaccccattcagcctccaaagaggctttgctgtgtgcacccag

SEQ ID NO: 25050 - RNA, 75 nt, synthetic construct
  source 1..75: mol_type = other RNA
catgtatacctgggggaaagccagagtcgggggaccccattcagcctccaaagaggctttgctgtgtgcacccag

SEQ ID NO: 25051 - RNA, 75 nt, synthetic construct
  source 1..75: mol_type = other RNA
catgtaaacctgggggaaagccagagtcgggggaccccattcagcctccaaagaggctttgctgtgtgcacccag

SEQ ID NO: 25052 - RNA, 75 nt, synthetic construct
  source 1..75: mol_type = other RNA
catgtacacctgggggaaagccagagtcgggggaccccattcagcctccaaagaggctttgctgtgtgcacccag

SEQ ID NO: 25053 - RNA, 75 nt, synthetic construct
  source 1..75: mol_type = other RNA
catgtagacctgggggaaagccagagtcgggggaccccattcagcctccaaagaggctttgctgtgtgcacccag

SEQ ID NO: 25054 - RNA, 76 nt, synthetic construct
  source 1..76: mol_type = other RNA
acatgtacacctgggggaaagccagagtcgggggaccccattcagcctccaaagaggctttgctgtgtgcacccag

SEQ ID NO: 25055 - RNA, 76 nt, synthetic construct
  source 1..76: mol_type = other RNA
acatgtatacctgggggaaagccagagtcgggggaccccattcagcctccaaagaggctttgctgtgtgcacccag

SEQ ID NO: 25056 - RNA, 76 nt, synthetic construct
  source 1..76: mol_type = other RNA
acatgtaaacctgggggaaagccagagtcgggggaccccattcagcctccaaagaggctttgctgtgtgcacccag

SEQ ID NO: 25057 - RNA, 76 nt, synthetic construct
  source 1..76: mol_type = other RNA
acatgtagacctgggggaaagccagagtcgggggaccccattcagcctccaaagaggctttgctgtgtgcacccag

SEQ ID NO: 25058 - RNA, 77 nt, synthetic construct
  source 1..77: mol_type = other RNA
aacatgtacacctgggggaaagccagagtcgggggaccccattcagcctccaaagaggctttgctgtgtgcacccag

SEQ ID NO: 25059 - RNA, 77 nt, synthetic construct
  source 1..77: mol_type = other RNA
aacatgtagacctgggggaaagccagagtcgggggaccccattcagcctccaaagaggctttgctgtgtgcacccag

SEQ ID NO: 25060 - RNA, 77 nt, synthetic construct
  source 1..77: mol_type = other RNA
aacatgtatacctgggggaaagccagagtcgggggaccccattcagcctccaaagaggctttgctgtgtgcacccag

SEQ ID NO: 25061 - RNA, 77 nt, synthetic construct
  source 1..77: mol_type = other RNA
aacatgtaaacctgggggaaagccagagtcgggggaccccattcagcctccaaagaggctttgctgtgtgcacccag

SEQ ID NO: 25062 - RNA, 78 nt, synthetic construct
  source 1..78: mol_type = other RNA
gaacatgtacacctgggggaaagccagagtcgggggaccccattcagcctccaaagaggctttgctgtgtgcacccag

SEQ ID NO: 25063 - RNA, 78 nt, synthetic construct
  source 1..78: mol_type = other RNA
gaacatgtatacctgggggaaagccagagtcgggggaccccattcagcctccaaagaggctttgctgtgtgcacccag

SEQ ID NO: 25064 - RNA, 78 nt, synthetic construct
  source 1..78: mol_type = other RNA
gaacatgtagacctgggggaaagccagagtcgggggaccccattcagcctccaaagaggctttgctgtgtgcacccag

SEQ ID NO: 25065 - RNA, 78 nt, synthetic construct
  source 1..78: mol_type = other RNA
gaacatgtaaacctgggggaaagccagagtcgggggaccccattcagcctccaaagaggctttgctgtgtgcacccag

SEQ ID NO: 25066 - RNA, 79 nt, synthetic construct
  source 1..79: mol_type = other RNA
ggaacatgtatacctgggggaaagccagagtcgggggaccccattcagcctccaaagaggctttgctgtgtgcacccag

SEQ ID NO: 25067 - RNA, 79 nt, synthetic construct
  source 1..79: mol_type = other RNA
ggaacatgtagacctgggggaaagccagagtcgggggaccccattcagcctccaaagaggctttgctgtgtgcacccag

SEQ ID NO: 25068 - RNA, 79 nt, synthetic construct
  source 1..79: mol_type = other RNA
ggaacatgtaaacctgggggaaagccagagtcgggggaccccattcagcctccaaagaggctttgctgtgtgcacccag

SEQ ID NO: 25069 - RNA, 79 nt, synthetic construct
  source 1..79: mol_type = other RNA
ggaacatgtacacctgggggaaagccagagtcgggggaccccattcagcctccaaagaggctttgctgtgtgcacccag

SEQ ID NO: 25070 - RNA, 80 nt, synthetic construct
  source 1..80: mol_type = other RNA
aggaacatgtatacctgggggaaagccagagtcgggggaccccattcagcctccaaagaggctttgctgtgtgcacccag

SEQ ID NO: 25071 - RNA, 80 nt, synthetic construct
  source 1..80: mol_type = other RNA
aggaacatgtacacctgggggaaagccagagtcgggggaccccattcagcctccaaagaggctttgctgtgtgcacccag

SEQ ID NO: 25072 - RNA, 80 nt, synthetic construct
  source 1..80: mol_type = other RNA
aggaacatgtaaacctgggggaaagccagagtcgggggaccccattcagcctccaaagaggctttgctgtgtgcacccag

SEQ ID NO: 25073 - RNA, 80 nt, synthetic construct
  source 1..80: mol_type = other RNA
aggaacatgtagacctgggggaaagccagagtcgggggaccccattcagcctccaaagaggctttgctgtgtgcacccag

SEQ ID NO: 25074 - RNA, 81 nt, synthetic construct
  source 1..81: mol_type = other RNA
caggaacatgtatacctgggggaaagccagagtcgggggaccccattcagcctccaaagaggctttgctgtgtgcacccag

SEQ ID NO: 25075 - RNA, 81 nt, synthetic construct
  source 1..81: mol_type = other RNA
caggaacatgtaaacctgggggaaagccagagtcgggggaccccattcagcctccaaagaggctttgctgtgtgcacccag

SEQ ID NO: 25076 - RNA, 81 nt, synthetic construct
  source 1..81: mol_type = other RNA
caggaacatgtacacctgggggaaagccagagtcgggggaccccattcagcctccaaagaggctttgctgtgtgcacccag

SEQ ID NO: 25077 - RNA, 81 nt, synthetic construct
  source 1..81: mol_type = other RNA
caggaacatgtagacctgggggaaagccagagtcgggggaccccattcagcctccaaagaggctttgctgtgtgcacccag

SEQ ID NO: 25078 - RNA, 82 nt, synthetic construct
  source 1..82: mol_type = other RNA
ccaggaacatgtaaacctgggggaaagccagagtcgggggaccccattcagcctccaaagaggctttgctgtgtgcacccag

SEQ ID NO: 25079 - RNA, 82 nt, synthetic construct
  source 1..82: mol_type = other RNA
ccaggaacatgtacacctgggggaaagccagagtcgggggaccccattcagcctccaaagaggctttgctgtgtgcacccag

SEQ ID NO: 25080 - RNA, 82 nt, synthetic construct
  source 1..82: mol_type = other RNA
ccaggaacatgtagacctgggggaaagccagagtcgggggaccccattcagcctccaaagaggctttgctgtgtgcacccag

SEQ ID NO: 25081 - RNA, 82 nt, synthetic construct
  source 1..82: mol_type = other RNA
ccaggaacatgtatacctgggggaaagccagagtcgggggaccccattcagcctccaaagaggctttgctgtgtgcacccag

SEQ ID NO: 25082 - RNA, 83 nt, synthetic construct
  source 1..83: mol_type = other RNA
accaggaacatgtagacctgggggaaagccagagtcgggggaccccattcagcctccaaagaggctttgctgtgtgcacccag

SEQ ID NO: 25083 - RNA, 83 nt, synthetic construct
  source 1..83: mol_type = other RNA
accaggaacatgtaaacctgggggaaagccagagtcgggggaccccattcagcctccaaagaggctttgctgtgtgcacccag

SEQ ID NO: 25084 - RNA, 83 nt, synthetic construct
  source 1..83: mol_type = other RNA
accaggaacatgtacacctgggggaaagccagagtcgggggaccccattcagcctccaaagaggctttgctgtgtgcacccag

SEQ ID NO: 25085 - RNA, 83 nt, synthetic construct
  source 1..83: mol_type = other RNA
accaggaacatgtatacctgggggaaagccagagtcgggggaccccattcagcctccaaagaggctttgctgtgtgcacccag

SEQ ID NO: 25086 - RNA, 84 nt, synthetic construct
  source 1..84: mol_type = other RNA
caccaggaacatgtacacctgggggaaagccagagtcgggggaccccattcagcctccaaagaggctttgctgtgtgcacccag

SEQ ID NO: 25087 - RNA, 84 nt, synthetic construct
  source 1..84: mol_type = other RNA
caccaggaacatgtaaacctgggggaaagccagagtcgggggaccccattcagcctccaaagaggctttgctgtgtgcacccag

SEQ ID NO: 25088 - RNA, 84 nt, synthetic construct
  source 1..84: mol_type = other RNA
caccaggaacatgtagacctgggggaaagccagagtcgggggaccccattcagcctccaaagaggctttgctgtgtgcacccag

SEQ ID NO: 25089 - RNA, 84 nt, synthetic construct
  source 1..84: mol_type = other RNA
caccaggaacatgtatacctgggggaaagccagagtcgggggaccccattcagcctccaaagaggctttgctgtgtgcacccag

SEQ ID NO: 25090 - RNA, 85 nt, synthetic construct
  source 1..85: mol_type = other RNA
tcaccaggaacatgtatacctgggggaaagccagagtcgggggaccccattcagcctccaaagaggctttgctgtgtgcacccag

SEQ ID NO: 25091 - RNA, 85 nt, synthetic construct
  source 1..85: mol_type = other RNA
tcaccaggaacatgtacacctgggggaaagccagagtcgggggaccccattcagcctccaaagaggctttgctgtgtgcacccag

SEQ ID NO: 25092 - RNA, 85 nt, synthetic construct
  source 1..85: mol_type = other RNA
tcaccaggaacatgtaaacctgggggaaagccagagtcgggggaccccattcagcctccaaagaggctttgctgtgtgcacccag

SEQ ID NO: 25093 - RNA, 85 nt, synthetic construct
  source 1..85: mol_type = other RNA
tcaccaggaacatgtagacctgggggaaagccagagtcgggggaccccattcagcctccaaagaggctttgctgtgtgcacccag

SEQ ID NO: 25094 - RNA, 86 nt, synthetic construct
  source 1..86: mol_type = other RNA
ttcaccaggaacatgtacacctgggggaaagccagagtcgggggaccccattcagcctccaaagaggctttgctgtgtgcacccag

SEQ ID NO: 25095 - RNA, 86 nt, synthetic construct
  source 1..86: mol_type = other RNA
ttcaccaggaacatgtaaacctgggggaaagccagagtcgggggaccccattcagcctccaaagaggctttgctgtgtgcacccag

SEQ ID NO: 25096 - RNA, 86 nt, synthetic construct
  source 1..86: mol_type = other RNA
ttcaccaggaacatgtatacctgggggaaagccagagtcgggggaccccattcagcctccaaagaggctttgctgtgtgcacccag

SEQ ID NO: 25097 - RNA, 86 nt, synthetic construct
  source 1..86: mol_type = other RNA
ttcaccaggaacatgtagacctgggggaaagccagagtcgggggaccccattcagcctccaaagaggctttgctgtgtgcacccag

SEQ ID NO: 25098 - RNA, 87 nt, synthetic construct
  source 1..87: mol_type = other RNA
tttcaccaggaacatgtagacctgggggaaagccagagtcgggggaccccattcagcctccaaagaggctttgctgtgtgcacccag

SEQ ID NO: 25099 - RNA, 87 nt, synthetic construct
  source 1..87: mol_type = other RNA
tttcaccaggaacatgtacacctgggggaaagccagagtcgggggaccccattcagcctccaaagaggctttgctgtgtgcacccag

SEQ ID NO: 25100 - RNA, 87 nt, synthetic construct
  source 1..87: mol_type = other RNA
tttcaccaggaacatgtaaacctgggggaaagccagagtcgggggaccccattcagcctccaaagaggctttgctgtgtgcacccag

SEQ ID NO: 25101 - RNA, 87 nt, synthetic construct
  source 1..87: mol_type = other RNA
tttcaccaggaacatgtatacctgggggaaagccagagtcgggggaccccattcagcctccaaagaggctttgctgtgtgcacccag

SEQ ID NO: 25102 - RNA, 88 nt, synthetic construct
  source 1..88: mol_type = other RNA
atttcaccaggaacatgtacacctgggggaaagccagagtcgggggaccccattcagcctccaaagaggctttgctgtgtgcacccag

SEQ ID NO: 25103 - RNA, 88 nt, synthetic construct
  source 1..88: mol_type = other RNA
atttcaccaggaacatgtagacctgggggaaagccagagtcgggggaccccattcagcctccaaagaggctttgctgtgtgcacccag

SEQ ID NO: 25104 - RNA, 88 nt, synthetic construct
  source 1..88: mol_type = other RNA
atttcaccaggaacatgtaaacctgggggaaagccagagtcgggggaccccattcagcctccaaagaggctttgctgtgtgcacccag

SEQ ID NO: 25105 - RNA, 88 nt, synthetic construct
  source 1..88: mol_type = other RNA
atttcaccaggaacatgtatacctgggggaaagccagagtcgggggaccccattcagcctccaaagaggctttgctgtgtgcacccag

SEQ ID NO: 25106 - RNA, 89 nt, synthetic construct
  source 1..89: mol_type = other RNA
catttcaccaggaacatgtatacctgggggaaagccagagtcgggggaccccattcagcctccaaagaggctttgctgtgtgcacccag

SEQ ID NO: 25107 - RNA, 89 nt, synthetic construct
  source 1..89: mol_type = other RNA
catttcaccaggaacatgtaaacctgggggaaagccagagtcgggggaccccattcagcctccaaagaggctttgctgtgtgcacccag

SEQ ID NO: 25108 - RNA, 89 nt, synthetic construct
  source 1..89: mol_type = other RNA
catttcaccaggaacatgtacacctgggggaaagccagagtcgggggaccccattcagcctccaaagaggctttgctgtgtgcacccag

SEQ ID NO: 25109 - RNA, 89 nt, synthetic construct
  source 1..89: mol_type = other RNA
catttcaccaggaacatgtagacctgggggaaagccagagtcgggggaccccattcagcctccaaagaggctttgctgtgtgcacccag

SEQ ID NO: 25110 - RNA, 90 nt, synthetic construct
  source 1..90: mol_type = other RNA
ccatttcaccaggaacatgtagacctgggggaaagccagagtcgggggaccccattcagcctccaaagaggctttgctgtgtgcacccag

SEQ ID NO: 25111 - RNA, 90 nt, synthetic construct
  source 1..90: mol_type = other RNA
ccatttcaccaggaacatgtatacctgggggaaagccagagtcgggggaccccattcagcctccaaagaggctttgctgtgtgcacccag

SEQ ID NO: 25112 - RNA, 90 nt, synthetic construct
  source 1..90: mol_type = other RNA
ccatttcaccaggaacatgtacacctgggggaaagccagagtcgggggaccccattcagcctccaaagaggctttgctgtgtgcacccag

SEQ ID NO: 25113 - RNA, 90 nt, synthetic construct
  source 1..90: mol_type = other RNA
ccatttcaccaggaacatgtaaacctgggggaaagccagagtcgggggaccccattcagcctccaaagaggctttgctgtgtgcacccag

SEQ ID NO: 25114 - RNA, 91 nt, synthetic construct
  source 1..91: mol_type = other RNA
gccatttcaccaggaacatgtaaacctgggggaaagccagagtcgggggaccccattcagcctccaaagaggctttgctgtgtgcacccag

SEQ ID NO: 25115 - RNA, 91 nt, synthetic construct
  source 1..91: mol_type = other RNA
gccatttcaccaggaacatgtatacctgggggaaagccagagtcgggggaccccattcagcctccaaagaggctttgctgtgtgcacccag

SEQ ID NO: 25116 - RNA, 91 nt, synthetic construct
  source 1..91: mol_type = other RNA
gccatttcaccaggaacatgtacacctgggggaaagccagagtcgggggaccccattcagcctccaaagaggctttgctgtgtgcacccag

SEQ ID NO: 25117 - RNA, 91 nt, synthetic construct
  source 1..91: mol_type = other RNA
gccatttcaccaggaacatgtagacctgggggaaagccagagtcgggggaccccattcagcctccaaagaggctttgctgtgtgcacccag

SEQ ID NO: 25118 - RNA, 92 nt, synthetic construct
  source 1..92: mol_type = other RNA
tgccatttcaccaggaacatgtacacctgggggaaagccagagtcgggggaccccattcagcctccaaagaggctttgctgtgtgcacccag

SEQ ID NO: 25119 - RNA, 92 nt, synthetic construct
  source 1..92: mol_type = other RNA
tgccatttcaccaggaacatgtaaacctgggggaaagccagagtcgggggaccccattcagcctccaaagaggctttgctgtgtgcacccag

SEQ ID NO: 25120 - RNA, 92 nt, synthetic construct
  source 1..92: mol_type = other RNA
tgccatttcaccaggaacatgtagacctgggggaaagccagagtcgggggaccccattcagcctccaaagaggctttgctgtgtgcacccag

SEQ ID NO: 25121 - RNA, 92 nt, synthetic construct
  source 1..92: mol_type = other RNA
tgccatttcaccaggaacatgtatacctgggggaaagccagagtcgggggaccccattcagcctccaaagaggctttgctgtgtgcacccag

SEQ ID NO: 25122 - RNA, 93 nt, synthetic construct
  source 1..93: mol_type = other RNA
ctgccatttcaccaggaacatgtatacctgggggaaagccagagtcgggggaccccattcagcctccaaagaggctttgctgtgtgcacccag

SEQ ID NO: 25123 - RNA, 93 nt, synthetic construct
  source 1..93: mol_type = other RNA
ctgccatttcaccaggaacatgtagacctgggggaaagccagagtcgggggaccccattcagcctccaaagaggctttgctgtgtgcacccag

SEQ ID NO: 25124 - RNA, 93 nt, synthetic construct
  source 1..93: mol_type = other RNA
ctgccatttcaccaggaacatgtacacctgggggaaagccagagtcgggggaccccattcagcctccaaagaggctttgctgtgtgcacccag

SEQ ID NO: 25125 - RNA, 93 nt, synthetic construct
  source 1..93: mol_type = other RNA
ctgccatttcaccaggaacatgtaaacctgggggaaagccagagtcgggggaccccattcagcctccaaagaggctttgctgtgtgcacccag

SEQ ID NO: 25126 - RNA, 94 nt, synthetic construct
  source 1..94: mol_type = other RNA
cctgccatttcaccaggaacatgtagacctgggggaaagccagagtcgggggaccccattcagcctccaaagaggctttgctgtgtgcacccag

SEQ ID NO: 25127 - RNA, 94 nt, synthetic construct
  source 1..94: mol_type = other RNA
cctgccatttcaccaggaacatgtacacctgggggaaagccagagtcgggggaccccattcagcctccaaagaggctttgctgtgtgcacccag

SEQ ID NO: 25128 - RNA, 94 nt, synthetic construct
  source 1..94: mol_type = other RNA
cctgccatttcaccaggaacatgtaaacctgggggaaagccagagtcgggggaccccattcagcctccaaagaggctttgctgtgtgcacccag

SEQ ID NO: 25129 - RNA, 94 nt, synthetic construct
  source 1..94: mol_type = other RNA
cctgccatttcaccaggaacatgtatacctgggggaaagccagagtcgggggaccccattcagcctccaaagaggctttgctgtgtgcacccag

SEQ ID NO: 25130 - RNA, 95 nt, synthetic construct
  source 1..95: mol_type = other RNA
tcctgccatttcaccaggaacatgtaaacctgggggaaagccagagtcgggggaccccattcagcctccaaagaggctttgctgtgtgcacccag

SEQ ID NO: 25131 - RNA, 95 nt, synthetic construct
  source 1..95: mol_type = other RNA
tcctgccatttcaccaggaacatgtacacctgggggaaagccagagtcgggggaccccattcagcctccaaagaggctttgctgtgtgcacccag

SEQ ID NO: 25132 - RNA, 95 nt, synthetic construct
  source 1..95: mol_type = other RNA
tcctgccatttcaccaggaacatgtagacctgggggaaagccagagtcgggggaccccattcagcctccaaagaggctttgctgtgtgcacccag

SEQ ID NO: 25133 - RNA, 95 nt, synthetic construct
  source 1..95: mol_type = other RNA
tcctgccatttcaccaggaacatgtatacctgggggaaagccagagtcgggggaccccattcagcctccaaagaggctttgctgtgtgcacccag

SEQ ID NO: 25134 - RNA, 96 nt, synthetic construct
  source 1..96: mol_type = other RNA
gtcctgccatttcaccaggaacatgtacacctgggggaaagccagagtcgggggaccccattcagcctccaaagaggctttgctgtgtgcacccag

SEQ ID NO: 25135 - RNA, 96 nt, synthetic construct
  source 1..96: mol_type = other RNA
gtcctgccatttcaccaggaacatgtaaacctgggggaaagccagagtcgggggaccccattcagcctccaaagaggctttgctgtgtgcacccag

SEQ ID NO: 25136 - RNA, 96 nt, synthetic construct
  source 1..96: mol_type = other RNA
gtcctgccatttcaccaggaacatgtatacctgggggaaagccagagtcgggggaccccattcagcctccaaagaggctttgctgtgtgcacccag

SEQ ID NO: 25137 - RNA, 96 nt, synthetic construct
  source 1..96: mol_type = other RNA
gtcctgccatttcaccaggaacatgtagacctgggggaaagccagagtcgggggaccccattcagcctccaaagaggctttgctgtgtgcacccag

SEQ ID NO: 25138 - RNA, 97 nt, synthetic construct
  source 1..97: mol_type = other RNA
ggtcctgccatttcaccaggaacatgtaaacctgggggaaagccagagtcgggggaccccattcagcctccaaagaggctttgctgtgtgcacccag

SEQ ID NO: 25139 - RNA, 97 nt, synthetic construct
  source 1..97: mol_type = other RNA
ggtcctgccatttcaccaggaacatgtatacctgggggaaagccagagtcgggggaccccattcagcctccaaagaggctttgctgtgtgcacccag

SEQ ID NO: 25140 - RNA, 97 nt, synthetic construct
  source 1..97: mol_type = other RNA
ggtcctgccatttcaccaggaacatgtagacctgggggaaagccagagtcgggggaccccattcagcctccaaagaggctttgctgtgtgcacccag

SEQ ID NO: 25141 - RNA, 97 nt, synthetic construct
  source 1..97: mol_type = other RNA
ggtcctgccatttcaccaggaacatgtacacctgggggaaagccagagtcgggggaccccattcagcctccaaagaggctttgctgtgtgcacccag

SEQ ID NO: 25142 - RNA, 98 nt, synthetic construct
  source 1..98: mol_type = other RNA
aggtcctgccatttcaccaggaacatgtagacctgggggaaagccagagtcgggggaccccattcagcctccaaagaggctttgctgtgtgcacccag

SEQ ID NO: 25143 - RNA, 98 nt, synthetic construct
  source 1..98: mol_type = other RNA
aggtcctgccatttcaccaggaacatgtaaacctgggggaaagccagagtcgggggaccccattcagcctccaaagaggctttgctgtgtgcacccag

SEQ ID NO: 25144 - RNA, 98 nt, synthetic construct
  source 1..98: mol_type = other RNA
aggtcctgccatttcaccaggaacatgtacacctgggggaaagccagagtcgggggaccccattcagcctccaaagaggctttgctgtgtgcacccag

SEQ ID NO: 25145 - RNA, 98 nt, synthetic construct
  source 1..98: mol_type = other RNA
aggtcctgccatttcaccaggaacatgtatacctgggggaaagccagagtcgggggaccccattcagcctccaaagaggctttgctgtgtgcacccag

SEQ ID NO: 25146 - RNA, 99 nt, synthetic construct
  source 1..99: mol_type = other RNA
caggtcctgccatttcaccaggaacatgtatacctgggggaaagccagagtcgggggaccccattcagcctccaaagaggctttgctgtgtgcacccag

SEQ ID NO: 25147 - RNA, 99 nt, synthetic construct
  source 1..99: mol_type = other RNA
caggtcctgccatttcaccaggaacatgtagacctgggggaaagccagagtcgggggaccccattcagcctccaaagaggctttgctgtgtgcacccag

SEQ ID NO: 25148 - RNA, 99 nt, synthetic construct
  source 1..99: mol_type = other RNA
caggtcctgccatttcaccaggaacatgtacacctgggggaaagccagagtcgggggaccccattcagcctccaaagaggctttgctgtgtgcacccag

SEQ ID NO: 25149 - RNA, 99 nt, synthetic construct
  source 1..99: mol_type = other RNA
caggtcctgccatttcaccaggaacatgtaaacctgggggaaagccagagtcgggggaccccattcagcctccaaagaggctttgctgtgtgcacccag

SEQ ID NO: 25150 - RNA, 100 nt, synthetic construct
  source 1..100: mol_type = other RNA
acaggtcctgccatttcaccaggaacatgtaaacctgggggaaagccagagtcgggggaccccattcagcctccaaagaggctttgctgtgtgcacccag

SEQ ID NO: 25151 - RNA, 100 nt, synthetic construct
  source 1..100: mol_type = other RNA
acaggtcctgccatttcaccaggaacatgtacacctgggggaaagccagagtcgggggaccccattcagcctccaaagaggctttgctgtgtgcacccag

SEQ ID NO: 25152 - RNA, 100 nt, synthetic construct
  source 1..100: mol_type = other RNA
acaggtcctgccatttcaccaggaacatgtagacctgggggaaagccagagtcgggggaccccattcagcctccaaagaggctttgctgtgtgcacccag

SEQ ID NO: 25153 - RNA, 100 nt, synthetic construct
  source 1..100: mol_type = other RNA
acaggtcctgccatttcaccaggaacatgtatacctgggggaaagccagagtcgggggaccccattcagcctccaaagaggctttgctgtgtgcacccag

SEQ ID NO: 25154 - RNA, 101 nt, synthetic construct
  source 1..101: mol_type = other RNA
gacaggtcctgccatttcaccaggaacatgtacacctgggggaaagccagagtcgggggaccccattcagcctccaaagaggctttgctgtgtgcacccag

SEQ ID NO: 25155 - RNA, 101 nt, synthetic construct
  source 1..101: mol_type = other RNA
gacaggtcctgccatttcaccaggaacatgtatacctgggggaaagccagagtcgggggaccccattcagcctccaaagaggctttgctgtgtgcacccag

SEQ ID NO: 25156 - RNA, 101 nt, synthetic construct
  source 1..101: mol_type = other RNA
gacaggtcctgccatttcaccaggaacatgtagacctgggggaaagccagagtcgggggaccccattcagcctccaaagaggctttgctgtgtgcacccag

SEQ ID NO: 25157 - RNA, 101 nt, synthetic construct
  source 1..101: mol_type = other RNA
gacaggtcctgccatttcaccaggaacatgtaaacctgggggaaagccagagtcgggggaccccattcagcctccaaagaggctttgctgtgtgcacccag

SEQ ID NO: 25158 - RNA, 102 nt, synthetic construct
  source 1..102: mol_type = other RNA
cgacaggtcctgccatttcaccaggaacatgtaaacctgggggaaagccagagtcgggggaccccattcagcctccaaagaggctttgctgtgtgcacccag

SEQ ID NO: 25159 - RNA, 102 nt, synthetic construct
  source 1..102: mol_type = other RNA
cgacaggtcctgccatttcaccaggaacatgtacacctgggggaaagccagagtcgggggaccccattcagcctccaaagaggctttgctgtgtgcacccag

SEQ ID NO: 25160 - RNA, 102 nt, synthetic construct
  source 1..102: mol_type = other RNA
cgacaggtcctgccatttcaccaggaacatgtatacctgggggaaagccagagtcgggggaccccattcagcctccaaagaggctttgctgtgtgcacccag

SEQ ID NO: 25161 - RNA, 102 nt, synthetic construct
  source 1..102: mol_type = other RNA
cgacaggtcctgccatttcaccaggaacatgtagacctgggggaaagccagagtcgggggaccccattcagcctccaaagaggctttgctgtgtgcacccag

SEQ ID NO: 25162 - RNA, 103 nt, synthetic construct
  source 1..103: mol_type = other RNA
ccgacaggtcctgccatttcaccaggaacatgtagacctgggggaaagccagagtcgggggaccccattcagcctccaaagaggctttgctgtgtgcacccag

SEQ ID NO: 25163 - RNA, 103 nt, synthetic construct
  source 1..103: mol_type = other RNA
ccgacaggtcctgccatttcaccaggaacatgtatacctgggggaaagccagagtcgggggaccccattcagcctccaaagaggctttgctgtgtgcacccag

SEQ ID NO: 25164 - RNA, 103 nt, synthetic construct
  source 1..103: mol_type = other RNA
ccgacaggtcctgccatttcaccaggaacatgtaaacctgggggaaagccagagtcgggggaccccattcagcctccaaagaggctttgctgtgtgcacccag

SEQ ID NO: 25165 - RNA, 103 nt, synthetic construct
  source 1..103: mol_type = other RNA
ccgacaggtcctgccatttcaccaggaacatgtacacctgggggaaagccagagtcgggggaccccattcagcctccaaagaggctttgctgtgtgcacccag

SEQ ID NO: 25166 - RNA, 16 nt, synthetic construct
  source 1..16: mol_type = other RNA
cctctgggcttcctcc

SEQ ID NO: 25167 - RNA, 17 nt, synthetic construct
  source 1..17: mol_type = other RNA
tcctctgggcttcctcc

SEQ ID NO: 25168 - RNA, 18 nt, synthetic construct
  source 1..18: mol_type = other RNA
atcctctgggcttcctcc

SEQ ID NO: 25169 - RNA, 19 nt, synthetic construct
  source 1..19: mol_type = other RNA
aatcctctgggcttcctcc

SEQ ID NO: 25170 - RNA, 20 nt, synthetic construct
  source 1..20: mol_type = other RNA
caatcctctgggcttcctcc

SEQ ID NO: 25171 - RNA, 21 nt, synthetic construct
  source 1..21: mol_type = other RNA
ccaatcctctgggcttcctcc

SEQ ID NO: 25172 - RNA, 22 nt, synthetic construct
  source 1..22: mol_type = other RNA
cccaatcctctgggcttcctcc

SEQ ID NO: 25173-25177 - skipped (5 entries)

SEQ ID NO: 25178 - RNA, 10 nt, synthetic construct
  source 1..10: mol_type = other RNA
ggaagcccag

SEQ ID NO: 25179 - RNA, 11 nt, synthetic construct
  source 1..11: mol_type = other RNA
ggaagcccaga

SEQ ID NO: 25180 - RNA, 12 nt, synthetic construct
  source 1..12: mol_type = other RNA
ggaagcccagag

SEQ ID NO: 25181 - RNA, 13 nt, synthetic construct
  source 1..13: mol_type = other RNA
ggaagcccagagg

SEQ ID NO: 25182 - RNA, 14 nt, synthetic construct
  source 1..14: mol_type = other RNA
ggaagcccagagga

SEQ ID NO: 25183 - RNA, 15 nt, synthetic construct
  source 1..15: mol_type = other RNA
ggaagcccagaggat

SEQ ID NO: 25184 - RNA, 16 nt, synthetic construct
  source 1..16: mol_type = other RNA
ggaagcccagaggatt

SEQ ID NO: 25185 - RNA, 17 nt, synthetic construct
  source 1..17: mol_type = other RNA
ggaagcccagaggattg

SEQ ID NO: 25186 - RNA, 18 nt, synthetic construct
  source 1..18: mol_type = other RNA
ggaagcccagaggattgg

SEQ ID NO: 25187 - RNA, 19 nt, synthetic construct
  source 1..19: mol_type = other RNA
ggaagcccagaggattggg

SEQ ID NO: 25188 - RNA, 87 nt, synthetic construct
  source 1..87: mol_type = other RNA
acctgggggaaagccagagtcgggggaccccattcagcctccaaagaggctttgctgtgtgcacccaggatcccactacccactgga

SEQ ID NO: 25189 - RNA, 88 nt, synthetic construct
  source 1..88: mol_type = other RNA
cacctgggggaaagccagagtcgggggaccccattcagcctccaaagaggctttgctgtgtgcacccaggatcccactacccactgga

SEQ ID NO: 25190 - RNA, 88 nt, synthetic construct
  source 1..88: mol_type = other RNA
gacctgggggaaagccagagtcgggggaccccattcagcctccaaagaggctttgctgtgtgcacccaggatcccactacccactgga

SEQ ID NO: 25191 - RNA, 88 nt, synthetic construct
  source 1..88: mol_type = other RNA
aacctgggggaaagccagagtcgggggaccccattcagcctccaaagaggctttgctgtgtgcacccaggatcccactacccactgga

SEQ ID NO: 25192 - RNA, 88 nt, synthetic construct
  source 1..88: mol_type = other RNA
tacctgggggaaagccagagtcgggggaccccattcagcctccaaagaggctttgctgtgtgcacccaggatcccactacccactgga

SEQ ID NO: 25193 - RNA, 89 nt, synthetic construct
  source 1..89: mol_type = other RNA
aaacctgggggaaagccagagtcgggggaccccattcagcctccaaagaggctttgctgtgtgcacccaggatcccactacccactgga

SEQ ID NO: 25194 - RNA, 89 nt, synthetic construct
  source 1..89: mol_type = other RNA
acacctgggggaaagccagagtcgggggaccccattcagcctccaaagaggctttgctgtgtgcacccaggatcccactacccactgga

SEQ ID NO: 25195 - RNA, 89 nt, synthetic construct
  source 1..89: mol_type = other RNA
atacctgggggaaagccagagtcgggggaccccattcagcctccaaagaggctttgctgtgtgcacccaggatcccactacccactgga

SEQ ID NO: 25196 - RNA, 89 nt, synthetic construct
  source 1..89: mol_type = other RNA
agacctgggggaaagccagagtcgggggaccccattcagcctccaaagaggctttgctgtgtgcacccaggatcccactacccactgga

SEQ ID NO: 25197 - RNA, 90 nt, synthetic construct
  source 1..90: mol_type = other RNA
tagacctgggggaaagccagagtcgggggaccccattcagcctccaaagaggctttgctgtgtgcacccaggatcccactacccactgga

SEQ ID NO: 25198 - RNA, 90 nt, synthetic construct
  source 1..90: mol_type = other RNA
taaacctgggggaaagccagagtcgggggaccccattcagcctccaaagaggctttgctgtgtgcacccaggatcccactacccactgga

SEQ ID NO: 25199 - RNA, 90 nt, synthetic construct
  source 1..90: mol_type = other RNA
tacacctgggggaaagccagagtcgggggaccccattcagcctccaaagaggctttgctgtgtgcacccaggatcccactacccactgga

SEQ ID NO: 25200 - RNA, 90 nt, synthetic construct
  source 1..90: mol_type = other RNA
tatacctgggggaaagccagagtcgggggaccccattcagcctccaaagaggctttgctgtgtgcacccaggatcccactacccactgga

SEQ ID NO: 25201 - RNA, 91 nt, synthetic construct
  source 1..91: mol_type = other RNA
gtaaacctgggggaaagccagagtcgggggaccccattcagcctccaaagaggctttgctgtgtgcacccaggatcccactacccactgga

SEQ ID NO: 25202 - RNA, 91 nt, synthetic construct
  source 1..91: mol_type = other RNA
gtacacctgggggaaagccagagtcgggggaccccattcagcctccaaagaggctttgctgtgtgcacccaggatcccactacccactgga

SEQ ID NO: 25203 - RNA, 91 nt, synthetic construct
  source 1..91: mol_type = other RNA
gtatacctgggggaaagccagagtcgggggaccccattcagcctccaaagaggctttgctgtgtgcacccaggatcccactacccactgga

SEQ ID NO: 25204 - RNA, 91 nt, synthetic construct
  source 1..91: mol_type = other RNA
gtagacctgggggaaagccagagtcgggggaccccattcagcctccaaagaggctttgctgtgtgcacccaggatcccactacccactgga

SEQ ID NO: 25205 - RNA, 92 nt, synthetic construct
  source 1..92: mol_type = other RNA
tgtatacctgggggaaagccagagtcgggggaccccattcagcctccaaagaggctttgctgtgtgcacccaggatcccactacccactgga

SEQ ID NO: 25206 - RNA, 92 nt, synthetic construct
  source 1..92: mol_type = other RNA
tgtagacctgggggaaagccagagtcgggggaccccattcagcctccaaagaggctttgctgtgtgcacccaggatcccactacccactgga

SEQ ID NO: 25207 - RNA, 92 nt, synthetic construct
  source 1..92: mol_type = other RNA
tgtaaacctgggggaaagccagagtcgggggaccccattcagcctccaaagaggctttgctgtgtgcacccaggatcccactacccactgga

SEQ ID NO: 25208 - RNA, 92 nt, synthetic construct
  source 1..92: mol_type = other RNA
tgtacacctgggggaaagccagagtcgggggaccccattcagcctccaaagaggctttgctgtgtgcacccaggatcccactacccactgga

SEQ ID NO: 25209 - RNA, 93 nt, synthetic construct
  source 1..93: mol_type = other RNA
atgtaaacctgggggaaagccagagtcgggggaccccattcagcctccaaagaggctttgctgtgtgcacccaggatcccactacccactgga

SEQ ID NO: 25210 - RNA, 93 nt, synthetic construct
  source 1..93: mol_type = other RNA
atgtacacctgggggaaagccagagtcgggggaccccattcagcctccaaagaggctttgctgtgtgcacccaggatcccactacccactgga

SEQ ID NO: 25211 - RNA, 93 nt, synthetic construct
  source 1..93: mol_type = other RNA
atgtagacctgggggaaagccagagtcgggggaccccattcagcctccaaagaggctttgctgtgtgcacccaggatcccactacccactgga

SEQ ID NO: 25212 - RNA, 93 nt, synthetic construct
  source 1..93: mol_type = other RNA
atgtatacctgggggaaagccagagtcgggggaccccattcagcctccaaagaggctttgctgtgtgcacccaggatcccactacccactgga

SEQ ID NO: 25213 - RNA, 94 nt, synthetic construct
  source 1..94: mol_type = other RNA
catgtatacctgggggaaagccagagtcgggggaccccattcagcctccaaagaggctttgctgtgtgcacccaggatcccactacccactgga

SEQ ID NO: 25214 - RNA, 94 nt, synthetic construct
  source 1..94: mol_type = other RNA
catgtaaacctgggggaaagccagagtcgggggaccccattcagcctccaaagaggctttgctgtgtgcacccaggatcccactacccactgga

SEQ ID NO: 25215 - RNA, 94 nt, synthetic construct
  source 1..94: mol_type = other RNA
catgtacacctgggggaaagccagagtcgggggaccccattcagcctccaaagaggctttgctgtgtgcacccaggatcccactacccactgga

SEQ ID NO: 25216 - RNA, 94 nt, synthetic construct
  source 1..94: mol_type = other RNA
catgtagacctgggggaaagccagagtcgggggaccccattcagcctccaaagaggctttgctgtgtgcacccaggatcccactacccactgga

SEQ ID NO: 25217 - RNA, 95 nt, synthetic construct
  source 1..95: mol_type = other RNA
acatgtagacctgggggaaagccagagtcgggggaccccattcagcctccaaagaggctttgctgtgtgcacccaggatcccactacccactgga

SEQ ID NO: 25218 - RNA, 95 nt, synthetic construct
  source 1..95: mol_type = other RNA
acatgtatacctgggggaaagccagagtcgggggaccccattcagcctccaaagaggctttgctgtgtgcacccaggatcccactacccactgga

SEQ ID NO: 25219 - RNA, 95 nt, synthetic construct
  source 1..95: mol_type = other RNA
acatgtaaacctgggggaaagccagagtcgggggaccccattcagcctccaaagaggctttgctgtgtgcacccaggatcccactacccactgga

SEQ ID NO: 25220 - RNA, 95 nt, synthetic construct
  source 1..95: mol_type = other RNA
acatgtacacctgggggaaagccagagtcgggggaccccattcagcctccaaagaggctttgctgtgtgcacccaggatcccactacccactgga

SEQ ID NO: 25221 - RNA, 96 nt, synthetic construct
  source 1..96: mol_type = other RNA
aacatgtacacctgggggaaagccagagtcgggggaccccattcagcctccaaagaggctttgctgtgtgcacccaggatcccactacccactgga

SEQ ID NO: 25222 - RNA, 96 nt, synthetic construct
  source 1..96: mol_type = other RNA
aacatgtaaacctgggggaaagccagagtcgggggaccccattcagcctccaaagaggctttgctgtgtgcacccaggatcccactacccactgga

SEQ ID NO: 25223 - RNA, 96 nt, synthetic construct
  source 1..96: mol_type = other RNA
aacatgtatacctgggggaaagccagagtcgggggaccccattcagcctccaaagaggctttgctgtgtgcacccaggatcccactacccactgga

SEQ ID NO: 25224 - RNA, 96 nt, synthetic construct
  source 1..96: mol_type = other RNA
aacatgtagacctgggggaaagccagagtcgggggaccccattcagcctccaaagaggctttgctgtgtgcacccaggatcccactacccactgga

SEQ ID NO: 25225 - RNA, 97 nt, synthetic construct
  source 1..97: mol_type = other RNA
gaacatgtaaacctgggggaaagccagagtcgggggaccccattcagcctccaaagaggctttgctgtgtgcacccaggatcccactacccactgga

SEQ ID NO: 25226 - RNA, 97 nt, synthetic construct
  source 1..97: mol_type = other RNA
gaacatgtatacctgggggaaagccagagtcgggggaccccattcagcctccaaagaggctttgctgtgtgcacccaggatcccactacccactgga

SEQ ID NO: 25227 - RNA, 97 nt, synthetic construct
  source 1..97: mol_type = other RNA
gaacatgtacacctgggggaaagccagagtcgggggaccccattcagcctccaaagaggctttgctgtgtgcacccaggatcccactacccactgga

SEQ ID NO: 25228 - RNA, 97 nt, synthetic construct
  source 1..97: mol_type = other RNA
gaacatgtagacctgggggaaagccagagtcgggggaccccattcagcctccaaagaggctttgctgtgtgcacccaggatcccactacccactgga

SEQ ID NO: 25229 - RNA, 98 nt, synthetic construct
  source 1..98: mol_type = other RNA
ggaacatgtagacctgggggaaagccagagtcgggggaccccattcagcctccaaagaggctttgctgtgtgcacccaggatcccactacccactgga

SEQ ID NO: 25230 - RNA, 98 nt, synthetic construct
  source 1..98: mol_type = other RNA
ggaacatgtacacctgggggaaagccagagtcgggggaccccattcagcctccaaagaggctttgctgtgtgcacccaggatcccactacccactgga

SEQ ID NO: 25231 - RNA, 98 nt, synthetic construct
  source 1..98: mol_type = other RNA
ggaacatgtatacctgggggaaagccagagtcgggggaccccattcagcctccaaagaggctttgctgtgtgcacccaggatcccactacccactgga

SEQ ID NO: 25232 - RNA, 98 nt, synthetic construct
  source 1..98: mol_type = other RNA
ggaacatgtaaacctgggggaaagccagagtcgggggaccccattcagcctccaaagaggctttgctgtgtgcacccaggatcccactacccactgga

SEQ ID NO: 25233 - RNA, 99 nt, synthetic construct
  source 1..99: mol_type = other RNA
aggaacatgtacacctgggggaaagccagagtcgggggaccccattcagcctccaaagaggctttgctgtgtgcacccaggatcccactacccactgga

SEQ ID NO: 25234 - RNA, 99 nt, synthetic construct
  source 1..99: mol_type = other RNA
aggaacatgtaaacctgggggaaagccagagtcgggggaccccattcagcctccaaagaggctttgctgtgtgcacccaggatcccactacccactgga

SEQ ID NO: 25235 - RNA, 99 nt, synthetic construct
  source 1..99: mol_type = other RNA
aggaacatgtagacctgggggaaagccagagtcgggggaccccattcagcctccaaagaggctttgctgtgtgcacccaggatcccactacccactgga

SEQ ID NO: 25236 - RNA, 99 nt, synthetic construct
  source 1..99: mol_type = other RNA
aggaacatgtatacctgggggaaagccagagtcgggggaccccattcagcctccaaagaggctttgctgtgtgcacccaggatcccactacccactgga

SEQ ID NO: 25237 - RNA, 100 nt, synthetic construct
  source 1..100: mol_type = other RNA
caggaacatgtatacctgggggaaagccagagtcgggggaccccattcagcctccaaagaggctttgctgtgtgcacccaggatcccactacccactgga

SEQ ID NO: 25238 - RNA, 100 nt, synthetic construct
  source 1..100: mol_type = other RNA
caggaacatgtacacctgggggaaagccagagtcgggggaccccattcagcctccaaagaggctttgctgtgtgcacccaggatcccactacccactgga

SEQ ID NO: 25239 - RNA, 100 nt, synthetic construct
  source 1..100: mol_type = other RNA
caggaacatgtagacctgggggaaagccagagtcgggggaccccattcagcctccaaagaggctttgctgtgtgcacccaggatcccactacccactgga

SEQ ID NO: 25240 - RNA, 100 nt, synthetic construct
  source 1..100: mol_type = other RNA
caggaacatgtaaacctgggggaaagccagagtcgggggaccccattcagcctccaaagaggctttgctgtgtgcacccaggatcccactacccactgga

SEQ ID NO: 25241 - RNA, 101 nt, synthetic construct
  source 1..101: mol_type = other RNA
ccaggaacatgtagacctgggggaaagccagagtcgggggaccccattcagcctccaaagaggctttgctgtgtgcacccaggatcccactacccactgga

SEQ ID NO: 25242 - RNA, 101 nt, synthetic construct
  source 1..101: mol_type = other RNA
ccaggaacatgtaaacctgggggaaagccagagtcgggggaccccattcagcctccaaagaggctttgctgtgtgcacccaggatcccactacccactgga

SEQ ID NO: 25243 - RNA, 101 nt, synthetic construct
  source 1..101: mol_type = other RNA
ccaggaacatgtacacctgggggaaagccagagtcgggggaccccattcagcctccaaagaggctttgctgtgtgcacccaggatcccactacccactgga

SEQ ID NO: 25244 - RNA, 101 nt, synthetic construct
  source 1..101: mol_type = other RNA
ccaggaacatgtatacctgggggaaagccagagtcgggggaccccattcagcctccaaagaggctttgctgtgtgcacccaggatcccactacccactgga

SEQ ID NO: 25245 - RNA, 102 nt, synthetic construct
  source 1..102: mol_type = other RNA
accaggaacatgtagacctgggggaaagccagagtcgggggaccccattcagcctccaaagaggctttgctgtgtgcacccaggatcccactacccactgga

SEQ ID NO: 25246 - RNA, 102 nt, synthetic construct
  source 1..102: mol_type = other RNA
accaggaacatgtaaacctgggggaaagccagagtcgggggaccccattcagcctccaaagaggctttgctgtgtgcacccaggatcccactacccactgga

SEQ ID NO: 25247 - RNA, 102 nt, synthetic construct
  source 1..102: mol_type = other RNA
accaggaacatgtacacctgggggaaagccagagtcgggggaccccattcagcctccaaagaggctttgctgtgtgcacccaggatcccactacccactgga

SEQ ID NO: 25248 - RNA, 102 nt, synthetic construct
  source 1..102: mol_type = other RNA
accaggaacatgtatacctgggggaaagccagagtcgggggaccccattcagcctccaaagaggctttgctgtgtgcacccaggatcccactacccactgga

SEQ ID NO: 25249 - RNA, 103 nt, synthetic construct
  source 1..103: mol_type = other RNA
caccaggaacatgtaaacctgggggaaagccagagtcgggggaccccattcagcctccaaagaggctttgctgtgtgcacccaggatcccactacccactgga

SEQ ID NO: 25250 - RNA, 103 nt, synthetic construct
  source 1..103: mol_type = other RNA
caccaggaacatgtacacctgggggaaagccagagtcgggggaccccattcagcctccaaagaggctttgctgtgtgcacccaggatcccactacccactgga

SEQ ID NO: 25251 - RNA, 103 nt, synthetic construct
  source 1..103: mol_type = other RNA
caccaggaacatgtagacctgggggaaagccagagtcgggggaccccattcagcctccaaagaggctttgctgtgtgcacccaggatcccactacccactgga

SEQ ID NO: 25252 - RNA, 103 nt, synthetic construct
  source 1..103: mol_type = other RNA
caccaggaacatgtatacctgggggaaagccagagtcgggggaccccattcagcctccaaagaggctttgctgtgtgcacccaggatcccactacccactgga

SEQ ID NO: 25253 - RNA, 16 nt, synthetic construct
  source 1..16: mol_type = other RNA
ctcacatggaactcgt

SEQ ID NO: 25254 - RNA, 17 nt, synthetic construct
  source 1..17: mol_type = other RNA
actcacatggaactcgt

SEQ ID NO: 25255 - RNA, 18 nt, synthetic construct
  source 1..18: mol_type = other RNA
cactcacatggaactcgt

SEQ ID NO: 25256 - RNA, 19 nt, synthetic construct
  source 1..19: mol_type = other RNA
acactcacatggaactcgt

SEQ ID NO: 25257 - RNA, 20 nt, synthetic construct
  source 1..20: mol_type = other RNA
cacactcacatggaactcgt

SEQ ID NO: 25258 - RNA, 21 nt, synthetic construct
  source 1..21: mol_type = other RNA
ccacactcacatggaactcgt

SEQ ID NO: 25259 - RNA, 22 nt, synthetic construct
  source 1..22: mol_type = other RNA
cccacactcacatggaactcgt

SEQ ID NO: 25260-25265 - skipped (6 entries)

SEQ ID NO: 25266 - RNA, 10 nt, synthetic construct
  source 1..10: mol_type = other RNA
agttccatgt

SEQ ID NO: 25267 - RNA, 11 nt, synthetic construct
  source 1..11: mol_type = other RNA
agttccatgtg

SEQ ID NO: 25268 - RNA, 12 nt, synthetic construct
  source 1..12: mol_type = other RNA
agttccatgtga

SEQ ID NO: 25269 - RNA, 13 nt, synthetic construct
  source 1..13: mol_type = other RNA
agttccatgtgag

SEQ ID NO: 25270 - RNA, 14 nt, synthetic construct
  source 1..14: mol_type = other RNA
agttccatgtgagt

SEQ ID NO: 25271 - RNA, 15 nt, synthetic construct
  source 1..15: mol_type = other RNA
agttccatgtgagtg

SEQ ID NO: 25272 - RNA, 16 nt, synthetic construct
  source 1..16: mol_type = other RNA
agttccatgtgagtgt

SEQ ID NO: 25273 - RNA, 17 nt, synthetic construct
  source 1..17: mol_type = other RNA
agttccatgtgagtgtg

SEQ ID NO: 25274 - RNA, 18 nt, synthetic construct
  source 1..18: mol_type = other RNA
agttccatgtgagtgtgg

SEQ ID NO: 25275 - RNA, 19 nt, synthetic construct
  source 1..19: mol_type = other RNA
agttccatgtgagtgtggg

SEQ ID NO: 25276 - RNA, 73 nt, synthetic construct
  source 1..73: mol_type = other RNA
gtatacatgttcctggtgaaatggcaggacctgtcggagaaggtggtctaccggcgcttcaccgagatttacg

SEQ ID NO: 25277 - RNA, 73 nt, synthetic construct
  source 1..73: mol_type = other RNA
gtatacatgttcctggtgaaatggcaggacctgtcggagaaggtggtctaccggcgcttcaccgagatctacg

SEQ ID NO: 25278 - RNA, 73 nt, synthetic construct
  source 1..73: mol_type = other RNA
gtctacatgttcctggtgaaatggcaggacctgtcggagaaggtggtctaccggcgcttcaccgagatctacg

SEQ ID NO: 25279 - RNA, 73 nt, synthetic construct
  source 1..73: mol_type = other RNA
gtctacatgttcctggtgaaatggcaggacctgtcggagaaggtggtctaccggcgcttcaccgagatatacg

SEQ ID NO: 25280 - RNA, 73 nt, synthetic construct
  source 1..73: mol_type = other RNA
gtgtacatgttcctggtgaaatggcaggacctgtcggagaaggtggtctaccggcgcttcaccgagatctacg

SEQ ID NO: 25281 - RNA, 73 nt, synthetic construct
  source 1..73: mol_type = other RNA
gtttacatgttcctggtgaaatggcaggacctgtcggagaaggtggtctaccggcgcttcaccgagatttacg

SEQ ID NO: 25282 - RNA, 73 nt, synthetic construct
  source 1..73: mol_type = other RNA
gtgtacatgttcctggtgaaatggcaggacctgtcggagaaggtggtctaccggcgcttcaccgagatatacg

SEQ ID NO: 25283 - RNA, 73 nt, synthetic construct
  source 1..73: mol_type = other RNA
gtgtacatgttcctggtgaaatggcaggacctgtcggagaaggtggtctaccggcgcttcaccgagatttacg

SEQ ID NO: 25284 - RNA, 73 nt, synthetic construct
  source 1..73: mol_type = other RNA
gtttacatgttcctggtgaaatggcaggacctgtcggagaaggtggtctaccggcgcttcaccgagatatacg

SEQ ID NO: 25285 - RNA, 73 nt, synthetic construct
  source 1..73: mol_type = other RNA
gtttacatgttcctggtgaaatggcaggacctgtcggagaaggtggtctaccggcgcttcaccgagatctacg

SEQ ID NO: 25286 - RNA, 73 nt, synthetic construct
  source 1..73: mol_type = other RNA
gtctacatgttcctggtgaaatggcaggacctgtcggagaaggtggtctaccggcgcttcaccgagatttacg

SEQ ID NO: 25287 - RNA, 73 nt, synthetic construct
  source 1..73: mol_type = other RNA
gtatacatgttcctggtgaaatggcaggacctgtcggagaaggtggtctaccggcgcttcaccgagatatacg

SEQ ID NO: 25288 - RNA, 74 nt, synthetic construct
  source 1..74: mol_type = other RNA
ggtatacatgttcctggtgaaatggcaggacctgtcggagaaggtggtctaccggcgcttcaccgagatttacg

SEQ ID NO: 25289 - RNA, 74 nt, synthetic construct
  source 1..74: mol_type = other RNA
ggtatacatgttcctggtgaaatggcaggacctgtcggagaaggtggtctaccggcgcttcaccgagatctacg

SEQ ID NO: 25290 - RNA, 74 nt, synthetic construct
  source 1..74: mol_type = other RNA
ggtatacatgttcctggtgaaatggcaggacctgtcggagaaggtggtctaccggcgcttcaccgagatatacg

SEQ ID NO: 25291 - RNA, 74 nt, synthetic construct
  source 1..74: mol_type = other RNA
ggtctacatgttcctggtgaaatggcaggacctgtcggagaaggtggtctaccggcgcttcaccgagatatacg

SEQ ID NO: 25292 - RNA, 74 nt, synthetic construct
  source 1..74: mol_type = other RNA
ggtttacatgttcctggtgaaatggcaggacctgtcggagaaggtggtctaccggcgcttcaccgagatatacg

SEQ ID NO: 25293 - RNA, 74 nt, synthetic construct
  source 1..74: mol_type = other RNA
ggtgtacatgttcctggtgaaatggcaggacctgtcggagaaggtggtctaccggcgcttcaccgagatttacg

SEQ ID NO: 25294 - RNA, 74 nt, synthetic construct
  source 1..74: mol_type = other RNA
ggtctacatgttcctggtgaaatggcaggacctgtcggagaaggtggtctaccggcgcttcaccgagatttacg

SEQ ID NO: 25295 - RNA, 74 nt, synthetic construct
  source 1..74: mol_type = other RNA
ggtgtacatgttcctggtgaaatggcaggacctgtcggagaaggtggtctaccggcgcttcaccgagatatacg

SEQ ID NO: 25296 - RNA, 74 nt, synthetic construct
  source 1..74: mol_type = other RNA
ggtgtacatgttcctggtgaaatggcaggacctgtcggagaaggtggtctaccggcgcttcaccgagatctacg

SEQ ID NO: 25297 - RNA, 74 nt, synthetic construct
  source 1..74: mol_type = other RNA
ggtttacatgttcctggtgaaatggcaggacctgtcggagaaggtggtctaccggcgcttcaccgagatttacg

SEQ ID NO: 25298 - RNA, 74 nt, synthetic construct
  source 1..74: mol_type = other RNA
ggtttacatgttcctggtgaaatggcaggacctgtcggagaaggtggtctaccggcgcttcaccgagatctacg

SEQ ID NO: 25299 - RNA, 74 nt, synthetic construct
  source 1..74: mol_type = other RNA
ggtctacatgttcctggtgaaatggcaggacctgtcggagaaggtggtctaccggcgcttcaccgagatctacg

SEQ ID NO: 25300 - RNA, 75 nt, synthetic construct
  source 1..75: mol_type = other RNA
aggtctacatgttcctggtgaaatggcaggacctgtcggagaaggtggtctaccggcgcttcaccgagatatacg

SEQ ID NO: 25301 - RNA, 75 nt, synthetic construct
  source 1..75: mol_type = other RNA
aggtgtacatgttcctggtgaaatggcaggacctgtcggagaaggtggtctaccggcgcttcaccgagatctacg

SEQ ID NO: 25302 - RNA, 75 nt, synthetic construct
  source 1..75: mol_type = other RNA
aggtatacatgttcctggtgaaatggcaggacctgtcggagaaggtggtctaccggcgcttcaccgagatatacg

SEQ ID NO: 25303 - RNA, 75 nt, synthetic construct
  source 1..75: mol_type = other RNA
aggtatacatgttcctggtgaaatggcaggacctgtcggagaaggtggtctaccggcgcttcaccgagatctacg

SEQ ID NO: 25304 - RNA, 75 nt, synthetic construct
  source 1..75: mol_type = other RNA
aggtatacatgttcctggtgaaatggcaggacctgtcggagaaggtggtctaccggcgcttcaccgagatttacg

SEQ ID NO: 25305 - RNA, 75 nt, synthetic construct
  source 1..75: mol_type = other RNA
aggtttacatgttcctggtgaaatggcaggacctgtcggagaaggtggtctaccggcgcttcaccgagatttacg

SEQ ID NO: 25306 - RNA, 75 nt, synthetic construct
  source 1..75: mol_type = other RNA
aggtctacatgttcctggtgaaatggcaggacctgtcggagaaggtggtctaccggcgcttcaccgagatttacg

SEQ ID NO: 25307 - RNA, 75 nt, synthetic construct
  source 1..75: mol_type = other RNA
aggtttacatgttcctggtgaaatggcaggacctgtcggagaaggtggtctaccggcgcttcaccgagatatacg

SEQ ID NO: 25308 - RNA, 75 nt, synthetic construct
  source 1..75: mol_type = other RNA
aggtgtacatgttcctggtgaaatggcaggacctgtcggagaaggtggtctaccggcgcttcaccgagatatacg

SEQ ID NO: 25309 - RNA, 75 nt, synthetic construct
  source 1..75: mol_type = other RNA
aggtttacatgttcctggtgaaatggcaggacctgtcggagaaggtggtctaccggcgcttcaccgagatctacg

SEQ ID NO: 25310 - RNA, 75 nt, synthetic construct
  source 1..75: mol_type = other RNA
aggtgtacatgttcctggtgaaatggcaggacctgtcggagaaggtggtctaccggcgcttcaccgagatttacg

SEQ ID NO: 25311 - RNA, 75 nt, synthetic construct
  source 1..75: mol_type = other RNA
aggtctacatgttcctggtgaaatggcaggacctgtcggagaaggtggtctaccggcgcttcaccgagatctacg

SEQ ID NO: 25312 - RNA, 76 nt, synthetic construct
  source 1..76: mol_type = other RNA
caggtgtacatgttcctggtgaaatggcaggacctgtcggagaaggtggtctaccggcgcttcaccgagatctacg

SEQ ID NO: 25313 - RNA, 76 nt, synthetic construct
  source 1..76: mol_type = other RNA
caggtctacatgttcctggtgaaatggcaggacctgtcggagaaggtggtctaccggcgcttcaccgagatatacg

SEQ ID NO: 25314 - RNA, 76 nt, synthetic construct
  source 1..76: mol_type = other RNA
caggtgtacatgttcctggtgaaatggcaggacctgtcggagaaggtggtctaccggcgcttcaccgagatatacg

SEQ ID NO: 25315 - RNA, 76 nt, synthetic construct
  source 1..76: mol_type = other RNA
caggtgtacatgttcctggtgaaatggcaggacctgtcggagaaggtggtctaccggcgcttcaccgagatttacg

SEQ ID NO: 25316 - RNA, 76 nt, synthetic construct
  source 1..76: mol_type = other RNA
caggtctacatgttcctggtgaaatggcaggacctgtcggagaaggtggtctaccggcgcttcaccgagatctacg

SEQ ID NO: 25317 - RNA, 76 nt, synthetic construct
  source 1..76: mol_type = other RNA
caggtttacatgttcctggtgaaatggcaggacctgtcggagaaggtggtctaccggcgcttcaccgagatctacg

SEQ ID NO: 25318 - RNA, 76 nt, synthetic construct
  source 1..76: mol_type = other RNA
caggtttacatgttcctggtgaaatggcaggacctgtcggagaaggtggtctaccggcgcttcaccgagatttacg

SEQ ID NO: 25319 - RNA, 76 nt, synthetic construct
  source 1..76: mol_type = other RNA
caggtatacatgttcctggtgaaatggcaggacctgtcggagaaggtggtctaccggcgcttcaccgagatttacg

SEQ ID NO: 25320 - RNA, 76 nt, synthetic construct
  source 1..76: mol_type = other RNA
caggtatacatgttcctggtgaaatggcaggacctgtcggagaaggtggtctaccggcgcttcaccgagatctacg

SEQ ID NO: 25321 - RNA, 76 nt, synthetic construct
  source 1..76: mol_type = other RNA
caggtatacatgttcctggtgaaatggcaggacctgtcggagaaggtggtctaccggcgcttcaccgagatatacg

SEQ ID NO: 25322 - RNA, 76 nt, synthetic construct
  source 1..76: mol_type = other RNA
caggtctacatgttcctggtgaaatggcaggacctgtcggagaaggtggtctaccggcgcttcaccgagatttacg

SEQ ID NO: 25323 - RNA, 76 nt, synthetic construct
  source 1..76: mol_type = other RNA
caggtttacatgttcctggtgaaatggcaggacctgtcggagaaggtggtctaccggcgcttcaccgagatatacg

SEQ ID NO: 25324 - RNA, 77 nt, synthetic construct
  source 1..77: mol_type = other RNA
ccaggtctacatgttcctggtgaaatggcaggacctgtcggagaaggtggtctaccggcgcttcaccgagatctacg

SEQ ID NO: 25325 - RNA, 77 nt, synthetic construct
  source 1..77: mol_type = other RNA
ccaggtttacatgttcctggtgaaatggcaggacctgtcggagaaggtggtctaccggcgcttcaccgagatctacg

SEQ ID NO: 25326 - RNA, 77 nt, synthetic construct
  source 1..77: mol_type = other RNA
ccaggtttacatgttcctggtgaaatggcaggacctgtcggagaaggtggtctaccggcgcttcaccgagatttacg

SEQ ID NO: 25327 - RNA, 77 nt, synthetic construct
  source 1..77: mol_type = other RNA
ccaggtgtacatgttcctggtgaaatggcaggacctgtcggagaaggtggtctaccggcgcttcaccgagatctacg

SEQ ID NO: 25328 - RNA, 77 nt, synthetic construct
  source 1..77: mol_type = other RNA
ccaggtttacatgttcctggtgaaatggcaggacctgtcggagaaggtggtctaccggcgcttcaccgagatatacg

SEQ ID NO: 25329 - RNA, 77 nt, synthetic construct
  source 1..77: mol_type = other RNA
ccaggtgtacatgttcctggtgaaatggcaggacctgtcggagaaggtggtctaccggcgcttcaccgagatatacg

SEQ ID NO: 25330 - RNA, 77 nt, synthetic construct
  source 1..77: mol_type = other RNA
ccaggtctacatgttcctggtgaaatggcaggacctgtcggagaaggtggtctaccggcgcttcaccgagatatacg

SEQ ID NO: 25331 - RNA, 77 nt, synthetic construct
  source 1..77: mol_type = other RNA
ccaggtgtacatgttcctggtgaaatggcaggacctgtcggagaaggtggtctaccggcgcttcaccgagatttacg

SEQ ID NO: 25332 - RNA, 77 nt, synthetic construct
  source 1..77: mol_type = other RNA
ccaggtatacatgttcctggtgaaatggcaggacctgtcggagaaggtggtctaccggcgcttcaccgagatatacg

SEQ ID NO: 25333 - RNA, 77 nt, synthetic construct
  source 1..77: mol_type = other RNA
ccaggtatacatgttcctggtgaaatggcaggacctgtcggagaaggtggtctaccggcgcttcaccgagatttacg

SEQ ID NO: 25334 - RNA, 77 nt, synthetic construct
  source 1..77: mol_type = other RNA
ccaggtctacatgttcctggtgaaatggcaggacctgtcggagaaggtggtctaccggcgcttcaccgagatttacg

SEQ ID NO: 25335 - RNA, 77 nt, synthetic construct
  source 1..77: mol_type = other RNA
ccaggtatacatgttcctggtgaaatggcaggacctgtcggagaaggtggtctaccggcgcttcaccgagatctacg

SEQ ID NO: 25336 - RNA, 78 nt, synthetic construct
  source 1..78: mol_type = other RNA
cccaggtatacatgttcctggtgaaatggcaggacctgtcggagaaggtggtctaccggcgcttcaccgagatatacg

SEQ ID NO: 25337 - RNA, 78 nt, synthetic construct
  source 1..78: mol_type = other RNA
cccaggtatacatgttcctggtgaaatggcaggacctgtcggagaaggtggtctaccggcgcttcaccgagatctacg

SEQ ID NO: 25338 - RNA, 78 nt, synthetic construct
  source 1..78: mol_type = other RNA
cccaggtttacatgttcctggtgaaatggcaggacctgtcggagaaggtggtctaccggcgcttcaccgagatatacg

SEQ ID NO: 25339 - RNA, 78 nt, synthetic construct
  source 1..78: mol_type = other RNA
cccaggtatacatgttcctggtgaaatggcaggacctgtcggagaaggtggtctaccggcgcttcaccgagatttacg

SEQ ID NO: 25340 - RNA, 78 nt, synthetic construct
  source 1..78: mol_type = other RNA
cccaggtctacatgttcctggtgaaatggcaggacctgtcggagaaggtggtctaccggcgcttcaccgagatatacg

SEQ ID NO: 25341 - RNA, 78 nt, synthetic construct
  source 1..78: mol_type = other RNA
cccaggtctacatgttcctggtgaaatggcaggacctgtcggagaaggtggtctaccggcgcttcaccgagatttacg

SEQ ID NO: 25342 - RNA, 78 nt, synthetic construct
  source 1..78: mol_type = other RNA
cccaggtgtacatgttcctggtgaaatggcaggacctgtcggagaaggtggtctaccggcgcttcaccgagatctacg

SEQ ID NO: 25343 - RNA, 78 nt, synthetic construct
  source 1..78: mol_type = other RNA
cccaggtgtacatgttcctggtgaaatggcaggacctgtcggagaaggtggtctaccggcgcttcaccgagatatacg

SEQ ID NO: 25344 - RNA, 78 nt, synthetic construct
  source 1..78: mol_type = other RNA
cccaggtttacatgttcctggtgaaatggcaggacctgtcggagaaggtggtctaccggcgcttcaccgagatctacg

SEQ ID NO: 25345 - RNA, 78 nt, synthetic construct
  source 1..78: mol_type = other RNA
cccaggtttacatgttcctggtgaaatggcaggacctgtcggagaaggtggtctaccggcgcttcaccgagatttacg

SEQ ID NO: 25346 - RNA, 78 nt, synthetic construct
  source 1..78: mol_type = other RNA
cccaggtgtacatgttcctggtgaaatggcaggacctgtcggagaaggtggtctaccggcgcttcaccgagatttacg

SEQ ID NO: 25347 - RNA, 78 nt, synthetic construct
  source 1..78: mol_type = other RNA
cccaggtctacatgttcctggtgaaatggcaggacctgtcggagaaggtggtctaccggcgcttcaccgagatctacg

SEQ ID NO: 25348 - RNA, 79 nt, synthetic construct
  source 1..79: mol_type = other RNA
ccccaggtatacatgttcctggtgaaatggcaggacctgtcggagaaggtggtctaccggcgcttcaccgagatatacg

SEQ ID NO: 25349 - RNA, 79 nt, synthetic construct
  source 1..79: mol_type = other RNA
ccccaggtttacatgttcctggtgaaatggcaggacctgtcggagaaggtggtctaccggcgcttcaccgagatttacg

SEQ ID NO: 25350 - RNA, 79 nt, synthetic construct
  source 1..79: mol_type = other RNA
ccccaggtatacatgttcctggtgaaatggcaggacctgtcggagaaggtggtctaccggcgcttcaccgagatttacg

SEQ ID NO: 25351 - RNA, 79 nt, synthetic construct
  source 1..79: mol_type = other RNA
ccccaggtatacatgttcctggtgaaatggcaggacctgtcggagaaggtggtctaccggcgcttcaccgagatctacg

SEQ ID NO: 25352 - RNA, 79 nt, synthetic construct
  source 1..79: mol_type = other RNA
ccccaggtctacatgttcctggtgaaatggcaggacctgtcggagaaggtggtctaccggcgcttcaccgagatatacg

SEQ ID NO: 25353 - RNA, 79 nt, synthetic construct
  source 1..79: mol_type = other RNA
ccccaggtctacatgttcctggtgaaatggcaggacctgtcggagaaggtggtctaccggcgcttcaccgagatttacg

SEQ ID NO: 25354 - RNA, 79 nt, synthetic construct
  source 1..79: mol_type = other RNA
ccccaggtctacatgttcctggtgaaatggcaggacctgtcggagaaggtggtctaccggcgcttcaccgagatctacg

SEQ ID NO: 25355 - RNA, 79 nt, synthetic construct
  source 1..79: mol_type = other RNA
ccccaggtttacatgttcctggtgaaatggcaggacctgtcggagaaggtggtctaccggcgcttcaccgagatctacg

SEQ ID NO: 25356 - RNA, 79 nt, synthetic construct
  source 1..79: mol_type = other RNA
ccccaggtttacatgttcctggtgaaatggcaggacctgtcggagaaggtggtctaccggcgcttcaccgagatatacg

SEQ ID NO: 25357 - RNA, 79 nt, synthetic construct
  source 1..79: mol_type = other RNA
ccccaggtgtacatgttcctggtgaaatggcaggacctgtcggagaaggtggtctaccggcgcttcaccgagatttacg

SEQ ID NO: 25358 - RNA, 79 nt, synthetic construct
  source 1..79: mol_type = other RNA
ccccaggtgtacatgttcctggtgaaatggcaggacctgtcggagaaggtggtctaccggcgcttcaccgagatctacg

SEQ ID NO: 25359 - RNA, 79 nt, synthetic construct
  source 1..79: mol_type = other RNA
ccccaggtgtacatgttcctggtgaaatggcaggacctgtcggagaaggtggtctaccggcgcttcaccgagatatacg

SEQ ID NO: 25360 - RNA, 80 nt, synthetic construct
  source 1..80: mol_type = other RNA
cccccaggtttacatgttcctggtgaaatggcaggacctgtcggagaaggtggtctaccggcgcttcaccgagatctacg

SEQ ID NO: 25361 - RNA, 80 nt, synthetic construct
  source 1..80: mol_type = other RNA
cccccaggtctacatgttcctggtgaaatggcaggacctgtcggagaaggtggtctaccggcgcttcaccgagatctacg

SEQ ID NO: 25362 - RNA, 80 nt, synthetic construct
  source 1..80: mol_type = other RNA
cccccaggtgtacatgttcctggtgaaatggcaggacctgtcggagaaggtggtctaccggcgcttcaccgagatttacg

SEQ ID NO: 25363 - RNA, 80 nt, synthetic construct
  source 1..80: mol_type = other RNA
cccccaggtgtacatgttcctggtgaaatggcaggacctgtcggagaaggtggtctaccggcgcttcaccgagatatacg

SEQ ID NO: 25364 - RNA, 80 nt, synthetic construct
  source 1..80: mol_type = other RNA
cccccaggtctacatgttcctggtgaaatggcaggacctgtcggagaaggtggtctaccggcgcttcaccgagatttacg

SEQ ID NO: 25365 - RNA, 80 nt, synthetic construct
  source 1..80: mol_type = other RNA
cccccaggtgtacatgttcctggtgaaatggcaggacctgtcggagaaggtggtctaccggcgcttcaccgagatctacg

SEQ ID NO: 25366 - RNA, 80 nt, synthetic construct
  source 1..80: mol_type = other RNA
cccccaggtctacatgttcctggtgaaatggcaggacctgtcggagaaggtggtctaccggcgcttcaccgagatatacg

SEQ ID NO: 25367 - RNA, 80 nt, synthetic construct
  source 1..80: mol_type = other RNA
cccccaggtttacatgttcctggtgaaatggcaggacctgtcggagaaggtggtctaccggcgcttcaccgagatttacg

SEQ ID NO: 25368 - RNA, 80 nt, synthetic construct
  source 1..80: mol_type = other RNA
cccccaggtatacatgttcctggtgaaatggcaggacctgtcggagaaggtggtctaccggcgcttcaccgagatttacg

SEQ ID NO: 25369 - RNA, 80 nt, synthetic construct
  source 1..80: mol_type = other RNA
cccccaggtatacatgttcctggtgaaatggcaggacctgtcggagaaggtggtctaccggcgcttcaccgagatatacg

SEQ ID NO: 25370 - RNA, 80 nt, synthetic construct
  source 1..80: mol_type = other RNA
cccccaggtatacatgttcctggtgaaatggcaggacctgtcggagaaggtggtctaccggcgcttcaccgagatctacg

SEQ ID NO: 25371 - RNA, 80 nt, synthetic construct
  source 1..80: mol_type = other RNA
cccccaggtttacatgttcctggtgaaatggcaggacctgtcggagaaggtggtctaccggcgcttcaccgagatatacg

SEQ ID NO: 25372 - RNA, 81 nt, synthetic construct
  source 1..81: mol_type = other RNA
tcccccaggtttacatgttcctggtgaaatggcaggacctgtcggagaaggtggtctaccggcgcttcaccgagatatacg

SEQ ID NO: 25373 - RNA, 81 nt, synthetic construct
  source 1..81: mol_type = other RNA
tcccccaggtttacatgttcctggtgaaatggcaggacctgtcggagaaggtggtctaccggcgcttcaccgagatctacg

SEQ ID NO: 25374 - RNA, 81 nt, synthetic construct
  source 1..81: mol_type = other RNA
tcccccaggtttacatgttcctggtgaaatggcaggacctgtcggagaaggtggtctaccggcgcttcaccgagatttacg

SEQ ID NO: 25375 - RNA, 81 nt, synthetic construct
  source 1..81: mol_type = other RNA
tcccccaggtgtacatgttcctggtgaaatggcaggacctgtcggagaaggtggtctaccggcgcttcaccgagatctacg

SEQ ID NO: 25376 - RNA, 81 nt, synthetic construct
  source 1..81: mol_type = other RNA
tcccccaggtctacatgttcctggtgaaatggcaggacctgtcggagaaggtggtctaccggcgcttcaccgagatctacg

SEQ ID NO: 25377 - RNA, 81 nt, synthetic construct
  source 1..81: mol_type = other RNA
tcccccaggtctacatgttcctggtgaaatggcaggacctgtcggagaaggtggtctaccggcgcttcaccgagatatacg

SEQ ID NO: 25378 - RNA, 81 nt, synthetic construct
  source 1..81: mol_type = other RNA
tcccccaggtatacatgttcctggtgaaatggcaggacctgtcggagaaggtggtctaccggcgcttcaccgagatttacg

SEQ ID NO: 25379 - RNA, 81 nt, synthetic construct
  source 1..81: mol_type = other RNA
tcccccaggtatacatgttcctggtgaaatggcaggacctgtcggagaaggtggtctaccggcgcttcaccgagatctacg

SEQ ID NO: 25380 - RNA, 81 nt, synthetic construct
  source 1..81: mol_type = other RNA
tcccccaggtatacatgttcctggtgaaatggcaggacctgtcggagaaggtggtctaccggcgcttcaccgagatatacg

SEQ ID NO: 25381 - RNA, 81 nt, synthetic construct
  source 1..81: mol_type = other RNA
tcccccaggtgtacatgttcctggtgaaatggcaggacctgtcggagaaggtggtctaccggcgcttcaccgagatttacg

SEQ ID NO: 25382 - RNA, 81 nt, synthetic construct
  source 1..81: mol_type = other RNA
tcccccaggtgtacatgttcctggtgaaatggcaggacctgtcggagaaggtggtctaccggcgcttcaccgagatatacg

SEQ ID NO: 25383 - RNA, 81 nt, synthetic construct
  source 1..81: mol_type = other RNA
tcccccaggtctacatgttcctggtgaaatggcaggacctgtcggagaaggtggtctaccggcgcttcaccgagatttacg

SEQ ID NO: 25384 - RNA, 82 nt, synthetic construct
  source 1..82: mol_type = other RNA
ttcccccaggtatacatgttcctggtgaaatggcaggacctgtcggagaaggtggtctaccggcgcttcaccgagatctacg

SEQ ID NO: 25385 - RNA, 82 nt, synthetic construct
  source 1..82: mol_type = other RNA
ttcccccaggtgtacatgttcctggtgaaatggcaggacctgtcggagaaggtggtctaccggcgcttcaccgagatatacg

SEQ ID NO: 25386 - RNA, 82 nt, synthetic construct
  source 1..82: mol_type = other RNA
ttcccccaggtatacatgttcctggtgaaatggcaggacctgtcggagaaggtggtctaccggcgcttcaccgagatttacg

SEQ ID NO: 25387 - RNA, 82 nt, synthetic construct
  source 1..82: mol_type = other RNA
ttcccccaggtctacatgttcctggtgaaatggcaggacctgtcggagaaggtggtctaccggcgcttcaccgagatatacg

SEQ ID NO: 25388 - RNA, 82 nt, synthetic construct
  source 1..82: mol_type = other RNA
ttcccccaggtgtacatgttcctggtgaaatggcaggacctgtcggagaaggtggtctaccggcgcttcaccgagatttacg

SEQ ID NO: 25389 - RNA, 82 nt, synthetic construct
  source 1..82: mol_type = other RNA
ttcccccaggtgtacatgttcctggtgaaatggcaggacctgtcggagaaggtggtctaccggcgcttcaccgagatctacg

SEQ ID NO: 25390 - RNA, 82 nt, synthetic construct
  source 1..82: mol_type = other RNA
ttcccccaggtctacatgttcctggtgaaatggcaggacctgtcggagaaggtggtctaccggcgcttcaccgagatttacg

SEQ ID NO: 25391 - RNA, 82 nt, synthetic construct
  source 1..82: mol_type = other RNA
ttcccccaggtttacatgttcctggtgaaatggcaggacctgtcggagaaggtggtctaccggcgcttcaccgagatctacg

SEQ ID NO: 25392 - RNA, 82 nt, synthetic construct
  source 1..82: mol_type = other RNA
ttcccccaggtttacatgttcctggtgaaatggcaggacctgtcggagaaggtggtctaccggcgcttcaccgagatttacg

SEQ ID NO: 25393 - RNA, 82 nt, synthetic construct
  source 1..82: mol_type = other RNA
ttcccccaggtctacatgttcctggtgaaatggcaggacctgtcggagaaggtggtctaccggcgcttcaccgagatctacg

SEQ ID NO: 25394 - RNA, 82 nt, synthetic construct
  source 1..82: mol_type = other RNA
ttcccccaggtatacatgttcctggtgaaatggcaggacctgtcggagaaggtggtctaccggcgcttcaccgagatatacg

SEQ ID NO: 25395 - RNA, 82 nt, synthetic construct
  source 1..82: mol_type = other RNA
ttcccccaggtttacatgttcctggtgaaatggcaggacctgtcggagaaggtggtctaccggcgcttcaccgagatatacg

SEQ ID NO: 25396 - RNA, 83 nt, synthetic construct
  source 1..83: mol_type = other RNA
tttcccccaggtctacatgttcctggtgaaatggcaggacctgtcggagaaggtggtctaccggcgcttcaccgagatctacg

SEQ ID NO: 25397 - RNA, 83 nt, synthetic construct
  source 1..83: mol_type = other RNA
tttcccccaggtatacatgttcctggtgaaatggcaggacctgtcggagaaggtggtctaccggcgcttcaccgagatatacg

SEQ ID NO: 25398 - RNA, 83 nt, synthetic construct
  source 1..83: mol_type = other RNA
tttcccccaggtatacatgttcctggtgaaatggcaggacctgtcggagaaggtggtctaccggcgcttcaccgagatctacg

SEQ ID NO: 25399 - RNA, 83 nt, synthetic construct
  source 1..83: mol_type = other RNA
tttcccccaggtatacatgttcctggtgaaatggcaggacctgtcggagaaggtggtctaccggcgcttcaccgagatttacg

SEQ ID NO: 25400 - RNA, 83 nt, synthetic construct
  source 1..83: mol_type = other RNA
tttcccccaggtctacatgttcctggtgaaatggcaggacctgtcggagaaggtggtctaccggcgcttcaccgagatatacg

SEQ ID NO: 25401 - RNA, 83 nt, synthetic construct
  source 1..83: mol_type = other RNA
tttcccccaggtctacatgttcctggtgaaatggcaggacctgtcggagaaggtggtctaccggcgcttcaccgagatttacg

SEQ ID NO: 25402 - RNA, 83 nt, synthetic construct
  source 1..83: mol_type = other RNA
tttcccccaggtgtacatgttcctggtgaaatggcaggacctgtcggagaaggtggtctaccggcgcttcaccgagatctacg

SEQ ID NO: 25403 - RNA, 83 nt, synthetic construct
  source 1..83: mol_type = other RNA
tttcccccaggtgtacatgttcctggtgaaatggcaggacctgtcggagaaggtggtctaccggcgcttcaccgagatttacg

SEQ ID NO: 25404 - RNA, 83 nt, synthetic construct
  source 1..83: mol_type = other RNA
tttcccccaggtttacatgttcctggtgaaatggcaggacctgtcggagaaggtggtctaccggcgcttcaccgagatatacg

SEQ ID NO: 25405 - RNA, 83 nt, synthetic construct
  source 1..83: mol_type = other RNA
tttcccccaggtttacatgttcctggtgaaatggcaggacctgtcggagaaggtggtctaccggcgcttcaccgagatttacg

SEQ ID NO: 25406 - RNA, 83 nt, synthetic construct
  source 1..83: mol_type = other RNA
tttcccccaggtgtacatgttcctggtgaaatggcaggacctgtcggagaaggtggtctaccggcgcttcaccgagatatacg

SEQ ID NO: 25407 - RNA, 83 nt, synthetic construct
  source 1..83: mol_type = other RNA
tttcccccaggtttacatgttcctggtgaaatggcaggacctgtcggagaaggtggtctaccggcgcttcaccgagatctacg

SEQ ID NO: 25408 - RNA, 84 nt, synthetic construct
  source 1..84: mol_type = other RNA
ctttcccccaggtgtacatgttcctggtgaaatggcaggacctgtcggagaaggtggtctaccggcgcttcaccgagatttacg

SEQ ID NO: 25409 - RNA, 84 nt, synthetic construct
  source 1..84: mol_type = other RNA
ctttcccccaggtatacatgttcctggtgaaatggcaggacctgtcggagaaggtggtctaccggcgcttcaccgagatttacg

SEQ ID NO: 25410 - RNA, 84 nt, synthetic construct
  source 1..84: mol_type = other RNA
ctttcccccaggtctacatgttcctggtgaaatggcaggacctgtcggagaaggtggtctaccggcgcttcaccgagatatacg

SEQ ID NO: 25411 - RNA, 84 nt, synthetic construct
  source 1..84: mol_type = other RNA
ctttcccccaggtatacatgttcctggtgaaatggcaggacctgtcggagaaggtggtctaccggcgcttcaccgagatctacg

SEQ ID NO: 25412 - RNA, 84 nt, synthetic construct
  source 1..84: mol_type = other RNA
ctttcccccaggtctacatgttcctggtgaaatggcaggacctgtcggagaaggtggtctaccggcgcttcaccgagatttacg

SEQ ID NO: 25413 - RNA, 84 nt, synthetic construct
  source 1..84: mol_type = other RNA
ctttcccccaggtttacatgttcctggtgaaatggcaggacctgtcggagaaggtggtctaccggcgcttcaccgagatttacg

SEQ ID NO: 25414 - RNA, 84 nt, synthetic construct
  source 1..84: mol_type = other RNA
ctttcccccaggtttacatgttcctggtgaaatggcaggacctgtcggagaaggtggtctaccggcgcttcaccgagatatacg

SEQ ID NO: 25415 - RNA, 84 nt, synthetic construct
  source 1..84: mol_type = other RNA
ctttcccccaggtctacatgttcctggtgaaatggcaggacctgtcggagaaggtggtctaccggcgcttcaccgagatctacg

SEQ ID NO: 25416 - RNA, 84 nt, synthetic construct
  source 1..84: mol_type = other RNA
ctttcccccaggtatacatgttcctggtgaaatggcaggacctgtcggagaaggtggtctaccggcgcttcaccgagatatacg

SEQ ID NO: 25417 - RNA, 84 nt, synthetic construct
  source 1..84: mol_type = other RNA
ctttcccccaggtttacatgttcctggtgaaatggcaggacctgtcggagaaggtggtctaccggcgcttcaccgagatctacg

SEQ ID NO: 25418 - RNA, 84 nt, synthetic construct
  source 1..84: mol_type = other RNA
ctttcccccaggtgtacatgttcctggtgaaatggcaggacctgtcggagaaggtggtctaccggcgcttcaccgagatctacg

SEQ ID NO: 25419 - RNA, 84 nt, synthetic construct
  source 1..84: mol_type = other RNA
ctttcccccaggtgtacatgttcctggtgaaatggcaggacctgtcggagaaggtggtctaccggcgcttcaccgagatatacg

SEQ ID NO: 25420 - RNA, 85 nt, synthetic construct
  source 1..85: mol_type = other RNA
gctttcccccaggtgtacatgttcctggtgaaatggcaggacctgtcggagaaggtggtctaccggcgcttcaccgagatatacg

SEQ ID NO: 25421 - RNA, 85 nt, synthetic construct
  source 1..85: mol_type = other RNA
gctttcccccaggtatacatgttcctggtgaaatggcaggacctgtcggagaaggtggtctaccggcgcttcaccgagatctacg

SEQ ID NO: 25422 - RNA, 85 nt, synthetic construct
  source 1..85: mol_type = other RNA
gctttcccccaggtatacatgttcctggtgaaatggcaggacctgtcggagaaggtggtctaccggcgcttcaccgagatttacg

SEQ ID NO: 25423 - RNA, 85 nt, synthetic construct
  source 1..85: mol_type = other RNA
gctttcccccaggtctacatgttcctggtgaaatggcaggacctgtcggagaaggtggtctaccggcgcttcaccgagatatacg

SEQ ID NO: 25424 - RNA, 85 nt, synthetic construct
  source 1..85: mol_type = other RNA
gctttcccccaggtctacatgttcctggtgaaatggcaggacctgtcggagaaggtggtctaccggcgcttcaccgagatctacg

SEQ ID NO: 25425 - RNA, 85 nt, synthetic construct
  source 1..85: mol_type = other RNA
gctttcccccaggtttacatgttcctggtgaaatggcaggacctgtcggagaaggtggtctaccggcgcttcaccgagatatacg

SEQ ID NO: 25426 - RNA, 85 nt, synthetic construct
  source 1..85: mol_type = other RNA
gctttcccccaggtgtacatgttcctggtgaaatggcaggacctgtcggagaaggtggtctaccggcgcttcaccgagatctacg

SEQ ID NO: 25427 - RNA, 85 nt, synthetic construct
  source 1..85: mol_type = other RNA
gctttcccccaggtgtacatgttcctggtgaaatggcaggacctgtcggagaaggtggtctaccggcgcttcaccgagatttacg

SEQ ID NO: 25428 - RNA, 85 nt, synthetic construct
  source 1..85: mol_type = other RNA
gctttcccccaggtttacatgttcctggtgaaatggcaggacctgtcggagaaggtggtctaccggcgcttcaccgagatctacg

SEQ ID NO: 25429 - RNA, 85 nt, synthetic construct
  source 1..85: mol_type = other RNA
gctttcccccaggtttacatgttcctggtgaaatggcaggacctgtcggagaaggtggtctaccggcgcttcaccgagatttacg

SEQ ID NO: 25430 - RNA, 85 nt, synthetic construct
  source 1..85: mol_type = other RNA
gctttcccccaggtctacatgttcctggtgaaatggcaggacctgtcggagaaggtggtctaccggcgcttcaccgagatttacg

SEQ ID NO: 25431 - RNA, 85 nt, synthetic construct
  source 1..85: mol_type = other RNA
gctttcccccaggtatacatgttcctggtgaaatggcaggacctgtcggagaaggtggtctaccggcgcttcaccgagatatacg

SEQ ID NO: 25432 - RNA, 86 nt, synthetic construct
  source 1..86: mol_type = other RNA
ggctttcccccaggtttacatgttcctggtgaaatggcaggacctgtcggagaaggtggtctaccggcgcttcaccgagatctacg

SEQ ID NO: 25433 - RNA, 86 nt, synthetic construct
  source 1..86: mol_type = other RNA
ggctttcccccaggtgtacatgttcctggtgaaatggcaggacctgtcggagaaggtggtctaccggcgcttcaccgagatctacg

SEQ ID NO: 25434 - RNA, 86 nt, synthetic construct
  source 1..86: mol_type = other RNA
ggctttcccccaggtgtacatgttcctggtgaaatggcaggacctgtcggagaaggtggtctaccggcgcttcaccgagatatacg

SEQ ID NO: 25435 - RNA, 86 nt, synthetic construct
  source 1..86: mol_type = other RNA
ggctttcccccaggtttacatgttcctggtgaaatggcaggacctgtcggagaaggtggtctaccggcgcttcaccgagatttacg

SEQ ID NO: 25436 - RNA, 86 nt, synthetic construct
  source 1..86: mol_type = other RNA
ggctttcccccaggtttacatgttcctggtgaaatggcaggacctgtcggagaaggtggtctaccggcgcttcaccgagatatacg

SEQ ID NO: 25437 - RNA, 86 nt, synthetic construct
  source 1..86: mol_type = other RNA
ggctttcccccaggtgtacatgttcctggtgaaatggcaggacctgtcggagaaggtggtctaccggcgcttcaccgagatttacg

SEQ ID NO: 25438 - RNA, 86 nt, synthetic construct
  source 1..86: mol_type = other RNA
ggctttcccccaggtatacatgttcctggtgaaatggcaggacctgtcggagaaggtggtctaccggcgcttcaccgagatatacg

SEQ ID NO: 25439 - RNA, 86 nt, synthetic construct
  source 1..86: mol_type = other RNA
ggctttcccccaggtctacatgttcctggtgaaatggcaggacctgtcggagaaggtggtctaccggcgcttcaccgagatctacg

SEQ ID NO: 25440 - RNA, 86 nt, synthetic construct
  source 1..86: mol_type = other RNA
ggctttcccccaggtctacatgttcctggtgaaatggcaggacctgtcggagaaggtggtctaccggcgcttcaccgagatttacg

SEQ ID NO: 25441 - RNA, 86 nt, synthetic construct
  source 1..86: mol_type = other RNA
ggctttcccccaggtctacatgttcctggtgaaatggcaggacctgtcggagaaggtggtctaccggcgcttcaccgagatatacg

SEQ ID NO: 25442 - RNA, 86 nt, synthetic construct
  source 1..86: mol_type = other RNA
ggctttcccccaggtatacatgttcctggtgaaatggcaggacctgtcggagaaggtggtctaccggcgcttcaccgagatttacg

SEQ ID NO: 25443 - RNA, 86 nt, synthetic construct
  source 1..86: mol_type = other RNA
ggctttcccccaggtatacatgttcctggtgaaatggcaggacctgtcggagaaggtggtctaccggcgcttcaccgagatctacg

SEQ ID NO: 25444 - RNA, 87 nt, synthetic construct
  source 1..87: mol_type = other RNA
tggctttcccccaggtctacatgttcctggtgaaatggcaggacctgtcggagaaggtggtctaccggcgcttcaccgagatatacg

SEQ ID NO: 25445 - RNA, 87 nt, synthetic construct
  source 1..87: mol_type = other RNA
tggctttcccccaggtatacatgttcctggtgaaatggcaggacctgtcggagaaggtggtctaccggcgcttcaccgagatttacg

SEQ ID NO: 25446 - RNA, 87 nt, synthetic construct
  source 1..87: mol_type = other RNA
tggctttcccccaggtatacatgttcctggtgaaatggcaggacctgtcggagaaggtggtctaccggcgcttcaccgagatctacg

SEQ ID NO: 25447 - RNA, 87 nt, synthetic construct
  source 1..87: mol_type = other RNA
tggctttcccccaggtatacatgttcctggtgaaatggcaggacctgtcggagaaggtggtctaccggcgcttcaccgagatatacg

SEQ ID NO: 25448 - RNA, 87 nt, synthetic construct
  source 1..87: mol_type = other RNA
tggctttcccccaggtctacatgttcctggtgaaatggcaggacctgtcggagaaggtggtctaccggcgcttcaccgagatctacg

SEQ ID NO: 25449 - RNA, 87 nt, synthetic construct
  source 1..87: mol_type = other RNA
tggctttcccccaggtgtacatgttcctggtgaaatggcaggacctgtcggagaaggtggtctaccggcgcttcaccgagatttacg

SEQ ID NO: 25450 - RNA, 87 nt, synthetic construct
  source 1..87: mol_type = other RNA
tggctttcccccaggtttacatgttcctggtgaaatggcaggacctgtcggagaaggtggtctaccggcgcttcaccgagatatacg

SEQ ID NO: 25451 - RNA, 87 nt, synthetic construct
  source 1..87: mol_type = other RNA
tggctttcccccaggtttacatgttcctggtgaaatggcaggacctgtcggagaaggtggtctaccggcgcttcaccgagatctacg

SEQ ID NO: 25452 - RNA, 87 nt, synthetic construct
  source 1..87: mol_type = other RNA
tggctttcccccaggtttacatgttcctggtgaaatggcaggacctgtcggagaaggtggtctaccggcgcttcaccgagatttacg

SEQ ID NO: 25453 - RNA, 87 nt, synthetic construct
  source 1..87: mol_type = other RNA
tggctttcccccaggtctacatgttcctggtgaaatggcaggacctgtcggagaaggtggtctaccggcgcttcaccgagatttacg

SEQ ID NO: 25454 - RNA, 87 nt, synthetic construct
  source 1..87: mol_type = other RNA
tggctttcccccaggtgtacatgttcctggtgaaatggcaggacctgtcggagaaggtggtctaccggcgcttcaccgagatatacg

SEQ ID NO: 25455 - RNA, 87 nt, synthetic construct
  source 1..87: mol_type = other RNA
tggctttcccccaggtgtacatgttcctggtgaaatggcaggacctgtcggagaaggtggtctaccggcgcttcaccgagatctacg

SEQ ID NO: 25456 - RNA, 88 nt, synthetic construct
  source 1..88: mol_type = other RNA
ctggctttcccccaggtatacatgttcctggtgaaatggcaggacctgtcggagaaggtggtctaccggcgcttcaccgagatttacg

SEQ ID NO: 25457 - RNA, 88 nt, synthetic construct
  source 1..88: mol_type = other RNA
ctggctttcccccaggtatacatgttcctggtgaaatggcaggacctgtcggagaaggtggtctaccggcgcttcaccgagatctacg

SEQ ID NO: 25458 - RNA, 88 nt, synthetic construct
  source 1..88: mol_type = other RNA
ctggctttcccccaggtctacatgttcctggtgaaatggcaggacctgtcggagaaggtggtctaccggcgcttcaccgagatatacg

SEQ ID NO: 25459 - RNA, 88 nt, synthetic construct
  source 1..88: mol_type = other RNA
ctggctttcccccaggtctacatgttcctggtgaaatggcaggacctgtcggagaaggtggtctaccggcgcttcaccgagatctacg

SEQ ID NO: 25460 - RNA, 88 nt, synthetic construct
  source 1..88: mol_type = other RNA
ctggctttcccccaggtctacatgttcctggtgaaatggcaggacctgtcggagaaggtggtctaccggcgcttcaccgagatttacg

SEQ ID NO: 25461 - RNA, 88 nt, synthetic construct
  source 1..88: mol_type = other RNA
ctggctttcccccaggtttacatgttcctggtgaaatggcaggacctgtcggagaaggtggtctaccggcgcttcaccgagatttacg

SEQ ID NO: 25462 - RNA, 88 nt, synthetic construct
  source 1..88: mol_type = other RNA
ctggctttcccccaggtatacatgttcctggtgaaatggcaggacctgtcggagaaggtggtctaccggcgcttcaccgagatatacg

SEQ ID NO: 25463 - RNA, 88 nt, synthetic construct
  source 1..88: mol_type = other RNA
ctggctttcccccaggtgtacatgttcctggtgaaatggcaggacctgtcggagaaggtggtctaccggcgcttcaccgagatctacg

SEQ ID NO: 25464 - RNA, 88 nt, synthetic construct
  source 1..88: mol_type = other RNA
ctggctttcccccaggtgtacatgttcctggtgaaatggcaggacctgtcggagaaggtggtctaccggcgcttcaccgagatatacg

SEQ ID NO: 25465 - RNA, 88 nt, synthetic construct
  source 1..88: mol_type = other RNA
ctggctttcccccaggtttacatgttcctggtgaaatggcaggacctgtcggagaaggtggtctaccggcgcttcaccgagatctacg

SEQ ID NO: 25466 - RNA, 88 nt, synthetic construct
  source 1..88: mol_type = other RNA
ctggctttcccccaggtttacatgttcctggtgaaatggcaggacctgtcggagaaggtggtctaccggcgcttcaccgagatatacg

SEQ ID NO: 25467 - RNA, 88 nt, synthetic construct
  source 1..88: mol_type = other RNA
ctggctttcccccaggtgtacatgttcctggtgaaatggcaggacctgtcggagaaggtggtctaccggcgcttcaccgagatttacg

SEQ ID NO: 25468 - RNA, 89 nt, synthetic construct
  source 1..89: mol_type = other RNA
tctggctttcccccaggtatacatgttcctggtgaaatggcaggacctgtcggagaaggtggtctaccggcgcttcaccgagatctacg

SEQ ID NO: 25469 - RNA, 89 nt, synthetic construct
  source 1..89: mol_type = other RNA
tctggctttcccccaggtctacatgttcctggtgaaatggcaggacctgtcggagaaggtggtctaccggcgcttcaccgagatatacg

SEQ ID NO: 25470 - RNA, 89 nt, synthetic construct
  source 1..89: mol_type = other RNA
tctggctttcccccaggtgtacatgttcctggtgaaatggcaggacctgtcggagaaggtggtctaccggcgcttcaccgagatctacg

SEQ ID NO: 25471 - RNA, 89 nt, synthetic construct
  source 1..89: mol_type = other RNA
tctggctttcccccaggtctacatgttcctggtgaaatggcaggacctgtcggagaaggtggtctaccggcgcttcaccgagatttacg

SEQ ID NO: 25472 - RNA, 89 nt, synthetic construct
  source 1..89: mol_type = other RNA
tctggctttcccccaggtctacatgttcctggtgaaatggcaggacctgtcggagaaggtggtctaccggcgcttcaccgagatctacg

SEQ ID NO: 25473 - RNA, 89 nt, synthetic construct
  source 1..89: mol_type = other RNA
tctggctttcccccaggtttacatgttcctggtgaaatggcaggacctgtcggagaaggtggtctaccggcgcttcaccgagatttacg

SEQ ID NO: 25474 - RNA, 89 nt, synthetic construct
  source 1..89: mol_type = other RNA
tctggctttcccccaggtgtacatgttcctggtgaaatggcaggacctgtcggagaaggtggtctaccggcgcttcaccgagatttacg

SEQ ID NO: 25475 - RNA, 89 nt, synthetic construct
  source 1..89: mol_type = other RNA
tctggctttcccccaggtttacatgttcctggtgaaatggcaggacctgtcggagaaggtggtctaccggcgcttcaccgagatatacg

SEQ ID NO: 25476 - RNA, 89 nt, synthetic construct
  source 1..89: mol_type = other RNA
tctggctttcccccaggtttacatgttcctggtgaaatggcaggacctgtcggagaaggtggtctaccggcgcttcaccgagatctacg

SEQ ID NO: 25477 - RNA, 89 nt, synthetic construct
  source 1..89: mol_type = other RNA
tctggctttcccccaggtatacatgttcctggtgaaatggcaggacctgtcggagaaggtggtctaccggcgcttcaccgagatatacg

SEQ ID NO: 25478 - RNA, 89 nt, synthetic construct
  source 1..89: mol_type = other RNA
tctggctttcccccaggtatacatgttcctggtgaaatggcaggacctgtcggagaaggtggtctaccggcgcttcaccgagatttacg

SEQ ID NO: 25479 - RNA, 89 nt, synthetic construct
  source 1..89: mol_type = other RNA
tctggctttcccccaggtgtacatgttcctggtgaaatggcaggacctgtcggagaaggtggtctaccggcgcttcaccgagatatacg

SEQ ID NO: 25480 - RNA, 90 nt, synthetic construct
  source 1..90: mol_type = other RNA
ctctggctttcccccaggtctacatgttcctggtgaaatggcaggacctgtcggagaaggtggtctaccggcgcttcaccgagatttacg

SEQ ID NO: 25481 - RNA, 90 nt, synthetic construct
  source 1..90: mol_type = other RNA
ctctggctttcccccaggtgtacatgttcctggtgaaatggcaggacctgtcggagaaggtggtctaccggcgcttcaccgagatatacg

SEQ ID NO: 25482 - RNA, 90 nt, synthetic construct
  source 1..90: mol_type = other RNA
ctctggctttcccccaggtttacatgttcctggtgaaatggcaggacctgtcggagaaggtggtctaccggcgcttcaccgagatatacg

SEQ ID NO: 25483 - RNA, 90 nt, synthetic construct
  source 1..90: mol_type = other RNA
ctctggctttcccccaggtgtacatgttcctggtgaaatggcaggacctgtcggagaaggtggtctaccggcgcttcaccgagatctacg

SEQ ID NO: 25484 - RNA, 90 nt, synthetic construct
  source 1..90: mol_type = other RNA
ctctggctttcccccaggtttacatgttcctggtgaaatggcaggacctgtcggagaaggtggtctaccggcgcttcaccgagatttacg

SEQ ID NO: 25485 - RNA, 90 nt, synthetic construct
  source 1..90: mol_type = other RNA
ctctggctttcccccaggtctacatgttcctggtgaaatggcaggacctgtcggagaaggtggtctaccggcgcttcaccgagatctacg

SEQ ID NO: 25486 - RNA, 90 nt, synthetic construct
  source 1..90: mol_type = other RNA
ctctggctttcccccaggtatacatgttcctggtgaaatggcaggacctgtcggagaaggtggtctaccggcgcttcaccgagatatacg

SEQ ID NO: 25487 - RNA, 90 nt, synthetic construct
  source 1..90: mol_type = other RNA
ctctggctttcccccaggtctacatgttcctggtgaaatggcaggacctgtcggagaaggtggtctaccggcgcttcaccgagatatacg

SEQ ID NO: 25488 - RNA, 90 nt, synthetic construct
  source 1..90: mol_type = other RNA
ctctggctttcccccaggtgtacatgttcctggtgaaatggcaggacctgtcggagaaggtggtctaccggcgcttcaccgagatttacg

SEQ ID NO: 25489 - RNA, 90 nt, synthetic construct
  source 1..90: mol_type = other RNA
ctctggctttcccccaggtatacatgttcctggtgaaatggcaggacctgtcggagaaggtggtctaccggcgcttcaccgagatctacg

SEQ ID NO: 25490 - RNA, 90 nt, synthetic construct
  source 1..90: mol_type = other RNA
ctctggctttcccccaggtatacatgttcctggtgaaatggcaggacctgtcggagaaggtggtctaccggcgcttcaccgagatttacg

SEQ ID NO: 25491 - RNA, 90 nt, synthetic construct
  source 1..90: mol_type = other RNA
ctctggctttcccccaggtttacatgttcctggtgaaatggcaggacctgtcggagaaggtggtctaccggcgcttcaccgagatctacg

SEQ ID NO: 25492 - RNA, 91 nt, synthetic construct
  source 1..91: mol_type = other RNA
actctggctttcccccaggtttacatgttcctggtgaaatggcaggacctgtcggagaaggtggtctaccggcgcttcaccgagatatacg

SEQ ID NO: 25493 - RNA, 91 nt, synthetic construct
  source 1..91: mol_type = other RNA
actctggctttcccccaggtctacatgttcctggtgaaatggcaggacctgtcggagaaggtggtctaccggcgcttcaccgagatctacg

SEQ ID NO: 25494 - RNA, 91 nt, synthetic construct
  source 1..91: mol_type = other RNA
actctggctttcccccaggtttacatgttcctggtgaaatggcaggacctgtcggagaaggtggtctaccggcgcttcaccgagatctacg

SEQ ID NO: 25495 - RNA, 91 nt, synthetic construct
  source 1..91: mol_type = other RNA
actctggctttcccccaggtgtacatgttcctggtgaaatggcaggacctgtcggagaaggtggtctaccggcgcttcaccgagatctacg

SEQ ID NO: 25496 - RNA, 91 nt, synthetic construct
  source 1..91: mol_type = other RNA
actctggctttcccccaggtatacatgttcctggtgaaatggcaggacctgtcggagaaggtggtctaccggcgcttcaccgagatatacg

SEQ ID NO: 25497 - RNA, 91 nt, synthetic construct
  source 1..91: mol_type = other RNA
actctggctttcccccaggtctacatgttcctggtgaaatggcaggacctgtcggagaaggtggtctaccggcgcttcaccgagatttacg

SEQ ID NO: 25498 - RNA, 91 nt, synthetic construct
  source 1..91: mol_type = other RNA
actctggctttcccccaggtgtacatgttcctggtgaaatggcaggacctgtcggagaaggtggtctaccggcgcttcaccgagatatacg

SEQ ID NO: 25499 - RNA, 91 nt, synthetic construct
  source 1..91: mol_type = other RNA
actctggctttcccccaggtctacatgttcctggtgaaatggcaggacctgtcggagaaggtggtctaccggcgcttcaccgagatatacg

SEQ ID NO: 25500 - RNA, 91 nt, synthetic construct
  source 1..91: mol_type = other RNA
actctggctttcccccaggtgtacatgttcctggtgaaatggcaggacctgtcggagaaggtggtctaccggcgcttcaccgagatttacg

SEQ ID NO: 25501 - RNA, 91 nt, synthetic construct
  source 1..91: mol_type = other RNA
actctggctttcccccaggtatacatgttcctggtgaaatggcaggacctgtcggagaaggtggtctaccggcgcttcaccgagatctacg

SEQ ID NO: 25502 - RNA, 91 nt, synthetic construct
  source 1..91: mol_type = other RNA
actctggctttcccccaggtatacatgttcctggtgaaatggcaggacctgtcggagaaggtggtctaccggcgcttcaccgagatttacg

SEQ ID NO: 25503 - RNA, 91 nt, synthetic construct
  source 1..91: mol_type = other RNA
actctggctttcccccaggtttacatgttcctggtgaaatggcaggacctgtcggagaaggtggtctaccggcgcttcaccgagatttacg

SEQ ID NO: 25504 - RNA, 92 nt, synthetic construct
  source 1..92: mol_type = other RNA
gactctggctttcccccaggtctacatgttcctggtgaaatggcaggacctgtcggagaaggtggtctaccggcgcttcaccgagatctacg

SEQ ID NO: 25505 - RNA, 92 nt, synthetic construct
  source 1..92: mol_type = other RNA
gactctggctttcccccaggtctacatgttcctggtgaaatggcaggacctgtcggagaaggtggtctaccggcgcttcaccgagatttacg

SEQ ID NO: 25506 - RNA, 92 nt, synthetic construct
  source 1..92: mol_type = other RNA
gactctggctttcccccaggtgtacatgttcctggtgaaatggcaggacctgtcggagaaggtggtctaccggcgcttcaccgagatatacg

SEQ ID NO: 25507 - RNA, 92 nt, synthetic construct
  source 1..92: mol_type = other RNA
gactctggctttcccccaggtgtacatgttcctggtgaaatggcaggacctgtcggagaaggtggtctaccggcgcttcaccgagatttacg

SEQ ID NO: 25508 - RNA, 92 nt, synthetic construct
  source 1..92: mol_type = other RNA
gactctggctttcccccaggtttacatgttcctggtgaaatggcaggacctgtcggagaaggtggtctaccggcgcttcaccgagatatacg

SEQ ID NO: 25509 - RNA, 92 nt, synthetic construct
  source 1..92: mol_type = other RNA
gactctggctttcccccaggtttacatgttcctggtgaaatggcaggacctgtcggagaaggtggtctaccggcgcttcaccgagatctacg

SEQ ID NO: 25510 - RNA, 92 nt, synthetic construct
  source 1..92: mol_type = other RNA
gactctggctttcccccaggtatacatgttcctggtgaaatggcaggacctgtcggagaaggtggtctaccggcgcttcaccgagatttacg

SEQ ID NO: 25511 - RNA, 92 nt, synthetic construct
  source 1..92: mol_type = other RNA
gactctggctttcccccaggtatacatgttcctggtgaaatggcaggacctgtcggagaaggtggtctaccggcgcttcaccgagatctacg

SEQ ID NO: 25512 - RNA, 92 nt, synthetic construct
  source 1..92: mol_type = other RNA
gactctggctttcccccaggtgtacatgttcctggtgaaatggcaggacctgtcggagaaggtggtctaccggcgcttcaccgagatctacg

SEQ ID NO: 25513 - RNA, 92 nt, synthetic construct
  source 1..92: mol_type = other RNA
gactctggctttcccccaggtatacatgttcctggtgaaatggcaggacctgtcggagaaggtggtctaccggcgcttcaccgagatatacg

SEQ ID NO: 25514 - RNA, 92 nt, synthetic construct
  source 1..92: mol_type = other RNA
gactctggctttcccccaggtctacatgttcctggtgaaatggcaggacctgtcggagaaggtggtctaccggcgcttcaccgagatatacg

SEQ ID NO: 25515 - RNA, 92 nt, synthetic construct
  source 1..92: mol_type = other RNA
gactctggctttcccccaggtttacatgttcctggtgaaatggcaggacctgtcggagaaggtggtctaccggcgcttcaccgagatttacg

SEQ ID NO: 25516 - RNA, 93 nt, synthetic construct
  source 1..93: mol_type = other RNA
cgactctggctttcccccaggtctacatgttcctggtgaaatggcaggacctgtcggagaaggtggtctaccggcgcttcaccgagatctacg

SEQ ID NO: 25517 - RNA, 93 nt, synthetic construct
  source 1..93: mol_type = other RNA
cgactctggctttcccccaggtttacatgttcctggtgaaatggcaggacctgtcggagaaggtggtctaccggcgcttcaccgagatttacg

SEQ ID NO: 25518 - RNA, 93 nt, synthetic construct
  source 1..93: mol_type = other RNA
cgactctggctttcccccaggtctacatgttcctggtgaaatggcaggacctgtcggagaaggtggtctaccggcgcttcaccgagatttacg

SEQ ID NO: 25519 - RNA, 93 nt, synthetic construct
  source 1..93: mol_type = other RNA
cgactctggctttcccccaggtctacatgttcctggtgaaatggcaggacctgtcggagaaggtggtctaccggcgcttcaccgagatatacg

SEQ ID NO: 25520 - RNA, 93 nt, synthetic construct
  source 1..93: mol_type = other RNA
cgactctggctttcccccaggtgtacatgttcctggtgaaatggcaggacctgtcggagaaggtggtctaccggcgcttcaccgagatctacg

SEQ ID NO: 25521 - RNA, 93 nt, synthetic construct
  source 1..93: mol_type = other RNA
cgactctggctttcccccaggtttacatgttcctggtgaaatggcaggacctgtcggagaaggtggtctaccggcgcttcaccgagatatacg

SEQ ID NO: 25522 - RNA, 93 nt, synthetic construct
  source 1..93: mol_type = other RNA
cgactctggctttcccccaggtatacatgttcctggtgaaatggcaggacctgtcggagaaggtggtctaccggcgcttcaccgagatttacg

SEQ ID NO: 25523 - RNA, 93 nt, synthetic construct
  source 1..93: mol_type = other RNA
cgactctggctttcccccaggtatacatgttcctggtgaaatggcaggacctgtcggagaaggtggtctaccggcgcttcaccgagatctacg

SEQ ID NO: 25524 - RNA, 93 nt, synthetic construct
  source 1..93: mol_type = other RNA
cgactctggctttcccccaggtttacatgttcctggtgaaatggcaggacctgtcggagaaggtggtctaccggcgcttcaccgagatctacg

SEQ ID NO: 25525 - RNA, 93 nt, synthetic construct
  source 1..93: mol_type = other RNA
cgactctggctttcccccaggtatacatgttcctggtgaaatggcaggacctgtcggagaaggtggtctaccggcgcttcaccgagatatacg

SEQ ID NO: 25526 - RNA, 93 nt, synthetic construct
  source 1..93: mol_type = other RNA
cgactctggctttcccccaggtgtacatgttcctggtgaaatggcaggacctgtcggagaaggtggtctaccggcgcttcaccgagatatacg

SEQ ID NO: 25527 - RNA, 93 nt, synthetic construct
  source 1..93: mol_type = other RNA
cgactctggctttcccccaggtgtacatgttcctggtgaaatggcaggacctgtcggagaaggtggtctaccggcgcttcaccgagatttacg

SEQ ID NO: 25528 - RNA, 94 nt, synthetic construct
  source 1..94: mol_type = other RNA
ccgactctggctttcccccaggtctacatgttcctggtgaaatggcaggacctgtcggagaaggtggtctaccggcgcttcaccgagatttacg

SEQ ID NO: 25529 - RNA, 94 nt, synthetic construct
  source 1..94: mol_type = other RNA
ccgactctggctttcccccaggtatacatgttcctggtgaaatggcaggacctgtcggagaaggtggtctaccggcgcttcaccgagatatacg

SEQ ID NO: 25530 - RNA, 94 nt, synthetic construct
  source 1..94: mol_type = other RNA
ccgactctggctttcccccaggtctacatgttcctggtgaaatggcaggacctgtcggagaaggtggtctaccggcgcttcaccgagatatacg

SEQ ID NO: 25531 - RNA, 94 nt, synthetic construct
  source 1..94: mol_type = other RNA
ccgactctggctttcccccaggtctacatgttcctggtgaaatggcaggacctgtcggagaaggtggtctaccggcgcttcaccgagatctacg

SEQ ID NO: 25532 - RNA, 94 nt, synthetic construct
  source 1..94: mol_type = other RNA
ccgactctggctttcccccaggtatacatgttcctggtgaaatggcaggacctgtcggagaaggtggtctaccggcgcttcaccgagatttacg

SEQ ID NO: 25533 - RNA, 94 nt, synthetic construct
  source 1..94: mol_type = other RNA
ccgactctggctttcccccaggtgtacatgttcctggtgaaatggcaggacctgtcggagaaggtggtctaccggcgcttcaccgagatatacg

SEQ ID NO: 25534 - RNA, 94 nt, synthetic construct
  source 1..94: mol_type = other RNA
ccgactctggctttcccccaggtttacatgttcctggtgaaatggcaggacctgtcggagaaggtggtctaccggcgcttcaccgagatctacg

SEQ ID NO: 25535 - RNA, 94 nt, synthetic construct
  source 1..94: mol_type = other RNA
ccgactctggctttcccccaggtgtacatgttcctggtgaaatggcaggacctgtcggagaaggtggtctaccggcgcttcaccgagatttacg

SEQ ID NO: 25536 - RNA, 94 nt, synthetic construct
  source 1..94: mol_type = other RNA
ccgactctggctttcccccaggtttacatgttcctggtgaaatggcaggacctgtcggagaaggtggtctaccggcgcttcaccgagatatacg

SEQ ID NO: 25537 - RNA, 94 nt, synthetic construct
  source 1..94: mol_type = other RNA
ccgactctggctttcccccaggtatacatgttcctggtgaaatggcaggacctgtcggagaaggtggtctaccggcgcttcaccgagatctacg

SEQ ID NO: 25538 - RNA, 94 nt, synthetic construct
  source 1..94: mol_type = other RNA
ccgactctggctttcccccaggtttacatgttcctggtgaaatggcaggacctgtcggagaaggtggtctaccggcgcttcaccgagatttacg

SEQ ID NO: 25539 - RNA, 94 nt, synthetic construct
  source 1..94: mol_type = other RNA
ccgactctggctttcccccaggtgtacatgttcctggtgaaatggcaggacctgtcggagaaggtggtctaccggcgcttcaccgagatctacg

SEQ ID NO: 25540 - RNA, 95 nt, synthetic construct
  source 1..95: mol_type = other RNA
cccgactctggctttcccccaggtgtacatgttcctggtgaaatggcaggacctgtcggagaaggtggtctaccggcgcttcaccgagatttacg

SEQ ID NO: 25541 - RNA, 95 nt, synthetic construct
  source 1..95: mol_type = other RNA
cccgactctggctttcccccaggtatacatgttcctggtgaaatggcaggacctgtcggagaaggtggtctaccggcgcttcaccgagatctacg

SEQ ID NO: 25542 - RNA, 95 nt, synthetic construct
  source 1..95: mol_type = other RNA
cccgactctggctttcccccaggtatacatgttcctggtgaaatggcaggacctgtcggagaaggtggtctaccggcgcttcaccgagatttacg

SEQ ID NO: 25543 - RNA, 95 nt, synthetic construct
  source 1..95: mol_type = other RNA
cccgactctggctttcccccaggtctacatgttcctggtgaaatggcaggacctgtcggagaaggtggtctaccggcgcttcaccgagatatacg

SEQ ID NO: 25544 - RNA, 95 nt, synthetic construct
  source 1..95: mol_type = other RNA
cccgactctggctttcccccaggtctacatgttcctggtgaaatggcaggacctgtcggagaaggtggtctaccggcgcttcaccgagatttacg

SEQ ID NO: 25545 - RNA, 95 nt, synthetic construct
  source 1..95: mol_type = other RNA
cccgactctggctttcccccaggtgtacatgttcctggtgaaatggcaggacctgtcggagaaggtggtctaccggcgcttcaccgagatatacg

SEQ ID NO: 25546 - RNA, 95 nt, synthetic construct
  source 1..95: mol_type = other RNA
cccgactctggctttcccccaggtatacatgttcctggtgaaatggcaggacctgtcggagaaggtggtctaccggcgcttcaccgagatatacg

SEQ ID NO: 25547 - RNA, 95 nt, synthetic construct
  source 1..95: mol_type = other RNA
cccgactctggctttcccccaggtgtacatgttcctggtgaaatggcaggacctgtcggagaaggtggtctaccggcgcttcaccgagatctacg

SEQ ID NO: 25548 - RNA, 95 nt, synthetic construct
  source 1..95: mol_type = other RNA
cccgactctggctttcccccaggtttacatgttcctggtgaaatggcaggacctgtcggagaaggtggtctaccggcgcttcaccgagatatacg

SEQ ID NO: 25549 - RNA, 95 nt, synthetic construct
  source 1..95: mol_type = other RNA
cccgactctggctttcccccaggtttacatgttcctggtgaaatggcaggacctgtcggagaaggtggtctaccggcgcttcaccgagatctacg

SEQ ID NO: 25550 - RNA, 95 nt, synthetic construct
  source 1..95: mol_type = other RNA
cccgactctggctttcccccaggtttacatgttcctggtgaaatggcaggacctgtcggagaaggtggtctaccggcgcttcaccgagatttacg

SEQ ID NO: 25551 - RNA, 95 nt, synthetic construct
  source 1..95: mol_type = other RNA
cccgactctggctttcccccaggtctacatgttcctggtgaaatggcaggacctgtcggagaaggtggtctaccggcgcttcaccgagatctacg

SEQ ID NO: 25552 - RNA, 96 nt, synthetic construct
  source 1..96: mol_type = other RNA
ccccgactctggctttcccccaggtatacatgttcctggtgaaatggcaggacctgtcggagaaggtggtctaccggcgcttcaccgagatttacg

SEQ ID NO: 25553 - RNA, 96 nt, synthetic construct
  source 1..96: mol_type = other RNA
ccccgactctggctttcccccaggtatacatgttcctggtgaaatggcaggacctgtcggagaaggtggtctaccggcgcttcaccgagatctacg

SEQ ID NO: 25554 - RNA, 96 nt, synthetic construct
  source 1..96: mol_type = other RNA
ccccgactctggctttcccccaggtatacatgttcctggtgaaatggcaggacctgtcggagaaggtggtctaccggcgcttcaccgagatatacg

SEQ ID NO: 25555 - RNA, 96 nt, synthetic construct
  source 1..96: mol_type = other RNA
ccccgactctggctttcccccaggtctacatgttcctggtgaaatggcaggacctgtcggagaaggtggtctaccggcgcttcaccgagatttacg

SEQ ID NO: 25556 - RNA, 96 nt, synthetic construct
  source 1..96: mol_type = other RNA
ccccgactctggctttcccccaggtctacatgttcctggtgaaatggcaggacctgtcggagaaggtggtctaccggcgcttcaccgagatatacg

SEQ ID NO: 25557 - RNA, 96 nt, synthetic construct
  source 1..96: mol_type = other RNA
ccccgactctggctttcccccaggtctacatgttcctggtgaaatggcaggacctgtcggagaaggtggtctaccggcgcttcaccgagatctacg

SEQ ID NO: 25558 - RNA, 96 nt, synthetic construct
  source 1..96: mol_type = other RNA
ccccgactctggctttcccccaggtgtacatgttcctggtgaaatggcaggacctgtcggagaaggtggtctaccggcgcttcaccgagatatacg

SEQ ID NO: 25559 - RNA, 96 nt, synthetic construct
  source 1..96: mol_type = other RNA
ccccgactctggctttcccccaggtgtacatgttcctggtgaaatggcaggacctgtcggagaaggtggtctaccggcgcttcaccgagatttacg

SEQ ID NO: 25560 - RNA, 96 nt, synthetic construct
  source 1..96: mol_type = other RNA
ccccgactctggctttcccccaggtttacatgttcctggtgaaatggcaggacctgtcggagaaggtggtctaccggcgcttcaccgagatatacg

SEQ ID NO: 25561 - RNA, 96 nt, synthetic construct
  source 1..96: mol_type = other RNA
ccccgactctggctttcccccaggtttacatgttcctggtgaaatggcaggacctgtcggagaaggtggtctaccggcgcttcaccgagatctacg

SEQ ID NO: 25562 - RNA, 96 nt, synthetic construct
  source 1..96: mol_type = other RNA
ccccgactctggctttcccccaggtgtacatgttcctggtgaaatggcaggacctgtcggagaaggtggtctaccggcgcttcaccgagatctacg

SEQ ID NO: 25563 - RNA, 96 nt, synthetic construct
  source 1..96: mol_type = other RNA
ccccgactctggctttcccccaggtttacatgttcctggtgaaatggcaggacctgtcggagaaggtggtctaccggcgcttcaccgagatttacg

SEQ ID NO: 25564 - RNA, 97 nt, synthetic construct
  source 1..97: mol_type = other RNA
cccccgactctggctttcccccaggtttacatgttcctggtgaaatggcaggacctgtcggagaaggtggtctaccggcgcttcaccgagatatacg

SEQ ID NO: 25565 - RNA, 97 nt, synthetic construct
  source 1..97: mol_type = other RNA
cccccgactctggctttcccccaggtttacatgttcctggtgaaatggcaggacctgtcggagaaggtggtctaccggcgcttcaccgagatttacg

SEQ ID NO: 25566 - RNA, 97 nt, synthetic construct
  source 1..97: mol_type = other RNA
cccccgactctggctttcccccaggtttacatgttcctggtgaaatggcaggacctgtcggagaaggtggtctaccggcgcttcaccgagatctacg

SEQ ID NO: 25567 - RNA, 97 nt, synthetic construct
  source 1..97: mol_type = other RNA
cccccgactctggctttcccccaggtatacatgttcctggtgaaatggcaggacctgtcggagaaggtggtctaccggcgcttcaccgagatatacg

SEQ ID NO: 25568 - RNA, 97 nt, synthetic construct
  source 1..97: mol_type = other RNA
cccccgactctggctttcccccaggtctacatgttcctggtgaaatggcaggacctgtcggagaaggtggtctaccggcgcttcaccgagatttacg

SEQ ID NO: 25569 - RNA, 97 nt, synthetic construct
  source 1..97: mol_type = other RNA
cccccgactctggctttcccccaggtgtacatgttcctggtgaaatggcaggacctgtcggagaaggtggtctaccggcgcttcaccgagatttacg

SEQ ID NO: 25570 - RNA, 97 nt, synthetic construct
  source 1..97: mol_type = other RNA
cccccgactctggctttcccccaggtgtacatgttcctggtgaaatggcaggacctgtcggagaaggtggtctaccggcgcttcaccgagatctacg

SEQ ID NO: 25571 - RNA, 97 nt, synthetic construct
  source 1..97: mol_type = other RNA
cccccgactctggctttcccccaggtgtacatgttcctggtgaaatggcaggacctgtcggagaaggtggtctaccggcgcttcaccgagatatacg

SEQ ID NO: 25572 - RNA, 97 nt, synthetic construct
  source 1..97: mol_type = other RNA
cccccgactctggctttcccccaggtctacatgttcctggtgaaatggcaggacctgtcggagaaggtggtctaccggcgcttcaccgagatatacg

SEQ ID NO: 25573 - RNA, 97 nt, synthetic construct
  source 1..97: mol_type = other RNA
cccccgactctggctttcccccaggtatacatgttcctggtgaaatggcaggacctgtcggagaaggtggtctaccggcgcttcaccgagatttacg

SEQ ID NO: 25574 - RNA, 97 nt, synthetic construct
  source 1..97: mol_type = other RNA
cccccgactctggctttcccccaggtatacatgttcctggtgaaatggcaggacctgtcggagaaggtggtctaccggcgcttcaccgagatctacg

SEQ ID NO: 25575 - RNA, 97 nt, synthetic construct
  source 1..97: mol_type = other RNA
cccccgactctggctttcccccaggtctacatgttcctggtgaaatggcaggacctgtcggagaaggtggtctaccggcgcttcaccgagatctacg

SEQ ID NO: 25576 - RNA, 98 nt, synthetic construct
  source 1..98: mol_type = other RNA
tcccccgactctggctttcccccaggtgtacatgttcctggtgaaatggcaggacctgtcggagaaggtggtctaccggcgcttcaccgagatctacg

SEQ ID NO: 25577 - RNA, 98 nt, synthetic construct
  source 1..98: mol_type = other RNA
tcccccgactctggctttcccccaggtttacatgttcctggtgaaatggcaggacctgtcggagaaggtggtctaccggcgcttcaccgagatttacg

SEQ ID NO: 25578 - RNA, 98 nt, synthetic construct
  source 1..98: mol_type = other RNA
tcccccgactctggctttcccccaggtctacatgttcctggtgaaatggcaggacctgtcggagaaggtggtctaccggcgcttcaccgagatctacg

SEQ ID NO: 25579 - RNA, 98 nt, synthetic construct
  source 1..98: mol_type = other RNA
tcccccgactctggctttcccccaggtctacatgttcctggtgaaatggcaggacctgtcggagaaggtggtctaccggcgcttcaccgagatatacg

SEQ ID NO: 25580 - RNA, 98 nt, synthetic construct
  source 1..98: mol_type = other RNA
tcccccgactctggctttcccccaggtgtacatgttcctggtgaaatggcaggacctgtcggagaaggtggtctaccggcgcttcaccgagatatacg

SEQ ID NO: 25581 - RNA, 98 nt, synthetic construct
  source 1..98: mol_type = other RNA
tcccccgactctggctttcccccaggtatacatgttcctggtgaaatggcaggacctgtcggagaaggtggtctaccggcgcttcaccgagatatacg

SEQ ID NO: 25582 - RNA, 98 nt, synthetic construct
  source 1..98: mol_type = other RNA
tcccccgactctggctttcccccaggtgtacatgttcctggtgaaatggcaggacctgtcggagaaggtggtctaccggcgcttcaccgagatttacg

SEQ ID NO: 25583 - RNA, 98 nt, synthetic construct
  source 1..98: mol_type = other RNA
tcccccgactctggctttcccccaggtttacatgttcctggtgaaatggcaggacctgtcggagaaggtggtctaccggcgcttcaccgagatctacg

SEQ ID NO: 25584 - RNA, 98 nt, synthetic construct
  source 1..98: mol_type = other RNA
tcccccgactctggctttcccccaggtctacatgttcctggtgaaatggcaggacctgtcggagaaggtggtctaccggcgcttcaccgagatttacg

SEQ ID NO: 25585 - RNA, 98 nt, synthetic construct
  source 1..98: mol_type = other RNA
tcccccgactctggctttcccccaggtatacatgttcctggtgaaatggcaggacctgtcggagaaggtggtctaccggcgcttcaccgagatctacg

SEQ ID NO: 25586 - RNA, 98 nt, synthetic construct
  source 1..98: mol_type = other RNA
tcccccgactctggctttcccccaggtatacatgttcctggtgaaatggcaggacctgtcggagaaggtggtctaccggcgcttcaccgagatttacg

SEQ ID NO: 25587 - RNA, 98 nt, synthetic construct
  source 1..98: mol_type = other RNA
tcccccgactctggctttcccccaggtttacatgttcctggtgaaatggcaggacctgtcggagaaggtggtctaccggcgcttcaccgagatatacg

SEQ ID NO: 25588 - RNA, 99 nt, synthetic construct
  source 1..99: mol_type = other RNA
gtcccccgactctggctttcccccaggtgtacatgttcctggtgaaatggcaggacctgtcggagaaggtggtctaccggcgcttcaccgagatctacg

SEQ ID NO: 25589 - RNA, 99 nt, synthetic construct
  source 1..99: mol_type = other RNA
gtcccccgactctggctttcccccaggtctacatgttcctggtgaaatggcaggacctgtcggagaaggtggtctaccggcgcttcaccgagatttacg

SEQ ID NO: 25590 - RNA, 99 nt, synthetic construct
  source 1..99: mol_type = other RNA
gtcccccgactctggctttcccccaggtatacatgttcctggtgaaatggcaggacctgtcggagaaggtggtctaccggcgcttcaccgagatatacg

SEQ ID NO: 25591 - RNA, 99 nt, synthetic construct
  source 1..99: mol_type = other RNA
gtcccccgactctggctttcccccaggtatacatgttcctggtgaaatggcaggacctgtcggagaaggtggtctaccggcgcttcaccgagatctacg

SEQ ID NO: 25592 - RNA, 99 nt, synthetic construct
  source 1..99: mol_type = other RNA
gtcccccgactctggctttcccccaggtctacatgttcctggtgaaatggcaggacctgtcggagaaggtggtctaccggcgcttcaccgagatatacg

SEQ ID NO: 25593 - RNA, 99 nt, synthetic construct
  source 1..99: mol_type = other RNA
gtcccccgactctggctttcccccaggtctacatgttcctggtgaaatggcaggacctgtcggagaaggtggtctaccggcgcttcaccgagatctacg

SEQ ID NO: 25594 - RNA, 99 nt, synthetic construct
  source 1..99: mol_type = other RNA
gtcccccgactctggctttcccccaggtgtacatgttcctggtgaaatggcaggacctgtcggagaaggtggtctaccggcgcttcaccgagatatacg

SEQ ID NO: 25595 - RNA, 99 nt, synthetic construct
  source 1..99: mol_type = other RNA
gtcccccgactctggctttcccccaggtatacatgttcctggtgaaatggcaggacctgtcggagaaggtggtctaccggcgcttcaccgagatttacg

SEQ ID NO: 25596 - RNA, 99 nt, synthetic construct
  source 1..99: mol_type = other RNA
gtcccccgactctggctttcccccaggtgtacatgttcctggtgaaatggcaggacctgtcggagaaggtggtctaccggcgcttcaccgagatttacg

SEQ ID NO: 25597 - RNA, 99 nt, synthetic construct
  source 1..99: mol_type = other RNA
gtcccccgactctggctttcccccaggtttacatgttcctggtgaaatggcaggacctgtcggagaaggtggtctaccggcgcttcaccgagatatacg

SEQ ID NO: 25598 - RNA, 99 nt, synthetic construct
  source 1..99: mol_type = other RNA
gtcccccgactctggctttcccccaggtttacatgttcctggtgaaatggcaggacctgtcggagaaggtggtctaccggcgcttcaccgagatctacg

SEQ ID NO: 25599 - RNA, 99 nt, synthetic construct
  source 1..99: mol_type = other RNA
gtcccccgactctggctttcccccaggtttacatgttcctggtgaaatggcaggacctgtcggagaaggtggtctaccggcgcttcaccgagatttacg

SEQ ID NO: 25600 - RNA, 100 nt, synthetic construct
  source 1..100: mol_type = other RNA
ggtcccccgactctggctttcccccaggtctacatgttcctggtgaaatggcaggacctgtcggagaaggtggtctaccggcgcttcaccgagatttacg

SEQ ID NO: 25601 - RNA, 100 nt, synthetic construct
  source 1..100: mol_type = other RNA
ggtcccccgactctggctttcccccaggtttacatgttcctggtgaaatggcaggacctgtcggagaaggtggtctaccggcgcttcaccgagatttacg

SEQ ID NO: 25602 - RNA, 100 nt, synthetic construct
  source 1..100: mol_type = other RNA
ggtcccccgactctggctttcccccaggtgtacatgttcctggtgaaatggcaggacctgtcggagaaggtggtctaccggcgcttcaccgagatctacg

SEQ ID NO: 25603 - RNA, 100 nt, synthetic construct
  source 1..100: mol_type = other RNA
ggtcccccgactctggctttcccccaggtttacatgttcctggtgaaatggcaggacctgtcggagaaggtggtctaccggcgcttcaccgagatatacg

SEQ ID NO: 25604 - RNA, 100 nt, synthetic construct
  source 1..100: mol_type = other RNA
ggtcccccgactctggctttcccccaggtgtacatgttcctggtgaaatggcaggacctgtcggagaaggtggtctaccggcgcttcaccgagatttacg

SEQ ID NO: 25605 - RNA, 100 nt, synthetic construct
  source 1..100: mol_type = other RNA
ggtcccccgactctggctttcccccaggtgtacatgttcctggtgaaatggcaggacctgtcggagaaggtggtctaccggcgcttcaccgagatatacg

SEQ ID NO: 25606 - RNA, 100 nt, synthetic construct
  source 1..100: mol_type = other RNA
ggtcccccgactctggctttcccccaggtttacatgttcctggtgaaatggcaggacctgtcggagaaggtggtctaccggcgcttcaccgagatctacg

SEQ ID NO: 25607 - RNA, 100 nt, synthetic construct
  source 1..100: mol_type = other RNA
ggtcccccgactctggctttcccccaggtctacatgttcctggtgaaatggcaggacctgtcggagaaggtggtctaccggcgcttcaccgagatctacg

SEQ ID NO: 25608 - RNA, 100 nt, synthetic construct
  source 1..100: mol_type = other RNA
ggtcccccgactctggctttcccccaggtctacatgttcctggtgaaatggcaggacctgtcggagaaggtggtctaccggcgcttcaccgagatatacg

SEQ ID NO: 25609 - RNA, 100 nt, synthetic construct
  source 1..100: mol_type = other RNA
ggtcccccgactctggctttcccccaggtatacatgttcctggtgaaatggcaggacctgtcggagaaggtggtctaccggcgcttcaccgagatttacg

SEQ ID NO: 25610 - RNA, 100 nt, synthetic construct
  source 1..100: mol_type = other RNA
ggtcccccgactctggctttcccccaggtatacatgttcctggtgaaatggcaggacctgtcggagaaggtggtctaccggcgcttcaccgagatctacg

SEQ ID NO: 25611 - RNA, 100 nt, synthetic construct
  source 1..100: mol_type = other RNA
ggtcccccgactctggctttcccccaggtatacatgttcctggtgaaatggcaggacctgtcggagaaggtggtctaccggcgcttcaccgagatatacg

SEQ ID NO: 25612 - RNA, 101 nt, synthetic construct
  source 1..101: mol_type = other RNA
gggtcccccgactctggctttcccccaggtgtacatgttcctggtgaaatggcaggacctgtcggagaaggtggtctaccggcgcttcaccgagatatacg

SEQ ID NO: 25613 - RNA, 101 nt, synthetic construct
  source 1..101: mol_type = other RNA
gggtcccccgactctggctttcccccaggtgtacatgttcctggtgaaatggcaggacctgtcggagaaggtggtctaccggcgcttcaccgagatctacg

SEQ ID NO: 25614 - RNA, 101 nt, synthetic construct
  source 1..101: mol_type = other RNA
gggtcccccgactctggctttcccccaggtgtacatgttcctggtgaaatggcaggacctgtcggagaaggtggtctaccggcgcttcaccgagatttacg

SEQ ID NO: 25615 - RNA, 101 nt, synthetic construct
  source 1..101: mol_type = other RNA
gggtcccccgactctggctttcccccaggtttacatgttcctggtgaaatggcaggacctgtcggagaaggtggtctaccggcgcttcaccgagatctacg

SEQ ID NO: 25616 - RNA, 101 nt, synthetic construct
  source 1..101: mol_type = other RNA
gggtcccccgactctggctttcccccaggtttacatgttcctggtgaaatggcaggacctgtcggagaaggtggtctaccggcgcttcaccgagatttacg

SEQ ID NO: 25617 - RNA, 101 nt, synthetic construct
  source 1..101: mol_type = other RNA
gggtcccccgactctggctttcccccaggtctacatgttcctggtgaaatggcaggacctgtcggagaaggtggtctaccggcgcttcaccgagatttacg

SEQ ID NO: 25618 - RNA, 101 nt, synthetic construct
  source 1..101: mol_type = other RNA
gggtcccccgactctggctttcccccaggtttacatgttcctggtgaaatggcaggacctgtcggagaaggtggtctaccggcgcttcaccgagatatacg

SEQ ID NO: 25619 - RNA, 101 nt, synthetic construct
  source 1..101: mol_type = other RNA
gggtcccccgactctggctttcccccaggtctacatgttcctggtgaaatggcaggacctgtcggagaaggtggtctaccggcgcttcaccgagatctacg

SEQ ID NO: 25620 - RNA, 101 nt, synthetic construct
  source 1..101: mol_type = other RNA
gggtcccccgactctggctttcccccaggtctacatgttcctggtgaaatggcaggacctgtcggagaaggtggtctaccggcgcttcaccgagatatacg

SEQ ID NO: 25621 - RNA, 101 nt, synthetic construct
  source 1..101: mol_type = other RNA
gggtcccccgactctggctttcccccaggtatacatgttcctggtgaaatggcaggacctgtcggagaaggtggtctaccggcgcttcaccgagatctacg

SEQ ID NO: 25622 - RNA, 101 nt, synthetic construct
  source 1..101: mol_type = other RNA
gggtcccccgactctggctttcccccaggtatacatgttcctggtgaaatggcaggacctgtcggagaaggtggtctaccggcgcttcaccgagatatacg

SEQ ID NO: 25623 - RNA, 101 nt, synthetic construct
  source 1..101: mol_type = other RNA
gggtcccccgactctggctttcccccaggtatacatgttcctggtgaaatggcaggacctgtcggagaaggtggtctaccggcgcttcaccgagatttacg

SEQ ID NO: 25624 - RNA, 102 nt, synthetic construct
  source 1..102: mol_type = other RNA
ggggtcccccgactctggctttcccccaggtatacatgttcctggtgaaatggcaggacctgtcggagaaggtggtctaccggcgcttcaccgagatatacg

SEQ ID NO: 25625 - RNA, 102 nt, synthetic construct
  source 1..102: mol_type = other RNA
ggggtcccccgactctggctttcccccaggtttacatgttcctggtgaaatggcaggacctgtcggagaaggtggtctaccggcgcttcaccgagatatacg

SEQ ID NO: 25626 - RNA, 102 nt, synthetic construct
  source 1..102: mol_type = other RNA
ggggtcccccgactctggctttcccccaggtatacatgttcctggtgaaatggcaggacctgtcggagaaggtggtctaccggcgcttcaccgagatttacg

SEQ ID NO: 25627 - RNA, 102 nt, synthetic construct
  source 1..102: mol_type = other RNA
ggggtcccccgactctggctttcccccaggtttacatgttcctggtgaaatggcaggacctgtcggagaaggtggtctaccggcgcttcaccgagatctacg

SEQ ID NO: 25628 - RNA, 102 nt, synthetic construct
  source 1..102: mol_type = other RNA
ggggtcccccgactctggctttcccccaggtatacatgttcctggtgaaatggcaggacctgtcggagaaggtggtctaccggcgcttcaccgagatctacg

SEQ ID NO: 25629 - RNA, 102 nt, synthetic construct
  source 1..102: mol_type = other RNA
ggggtcccccgactctggctttcccccaggtctacatgttcctggtgaaatggcaggacctgtcggagaaggtggtctaccggcgcttcaccgagatatacg

SEQ ID NO: 25630 - RNA, 102 nt, synthetic construct
  source 1..102: mol_type = other RNA
ggggtcccccgactctggctttcccccaggtttacatgttcctggtgaaatggcaggacctgtcggagaaggtggtctaccggcgcttcaccgagatttacg

SEQ ID NO: 25631 - RNA, 102 nt, synthetic construct
  source 1..102: mol_type = other RNA
ggggtcccccgactctggctttcccccaggtgtacatgttcctggtgaaatggcaggacctgtcggagaaggtggtctaccggcgcttcaccgagatctacg

SEQ ID NO: 25632 - RNA, 102 nt, synthetic construct
  source 1..102: mol_type = other RNA
ggggtcccccgactctggctttcccccaggtgtacatgttcctggtgaaatggcaggacctgtcggagaaggtggtctaccggcgcttcaccgagatttacg

SEQ ID NO: 25633 - RNA, 102 nt, synthetic construct
  source 1..102: mol_type = other RNA
ggggtcccccgactctggctttcccccaggtctacatgttcctggtgaaatggcaggacctgtcggagaaggtggtctaccggcgcttcaccgagatctacg

SEQ ID NO: 25634 - RNA, 102 nt, synthetic construct
  source 1..102: mol_type = other RNA
ggggtcccccgactctggctttcccccaggtgtacatgttcctggtgaaatggcaggacctgtcggagaaggtggtctaccggcgcttcaccgagatatacg

SEQ ID NO: 25635 - RNA, 102 nt, synthetic construct
  source 1..102: mol_type = other RNA
ggggtcccccgactctggctttcccccaggtctacatgttcctggtgaaatggcaggacctgtcggagaaggtggtctaccggcgcttcaccgagatttacg

SEQ ID NO: 25636 - RNA, 103 nt, synthetic construct
  source 1..103: mol_type = other RNA
tggggtcccccgactctggctttcccccaggtttacatgttcctggtgaaatggcaggacctgtcggagaaggtggtctaccggcgcttcaccgagatctacg

SEQ ID NO: 25637 - RNA, 103 nt, synthetic construct
  source 1..103: mol_type = other RNA
tggggtcccccgactctggctttcccccaggtttacatgttcctggtgaaatggcaggacctgtcggagaaggtggtctaccggcgcttcaccgagatatacg

SEQ ID NO: 25638 - RNA, 103 nt, synthetic construct
  source 1..103: mol_type = other RNA
tggggtcccccgactctggctttcccccaggtgtacatgttcctggtgaaatggcaggacctgtcggagaaggtggtctaccggcgcttcaccgagatttacg

SEQ ID NO: 25639 - RNA, 103 nt, synthetic construct
  source 1..103: mol_type = other RNA
tggggtcccccgactctggctttcccccaggtgtacatgttcctggtgaaatggcaggacctgtcggagaaggtggtctaccggcgcttcaccgagatatacg

SEQ ID NO: 25640 - RNA, 103 nt, synthetic construct
  source 1..103: mol_type = other RNA
tggggtcccccgactctggctttcccccaggtatacatgttcctggtgaaatggcaggacctgtcggagaaggtggtctaccggcgcttcaccgagatatacg

SEQ ID NO: 25641 - RNA, 103 nt, synthetic construct
  source 1..103: mol_type = other RNA
tggggtcccccgactctggctttcccccaggtatacatgttcctggtgaaatggcaggacctgtcggagaaggtggtctaccggcgcttcaccgagatctacg

SEQ ID NO: 25642 - RNA, 103 nt, synthetic construct
  source 1..103: mol_type = other RNA
tggggtcccccgactctggctttcccccaggtatacatgttcctggtgaaatggcaggacctgtcggagaaggtggtctaccggcgcttcaccgagatttacg

SEQ ID NO: 25643 - RNA, 103 nt, synthetic construct
  source 1..103: mol_type = other RNA
tggggtcccccgactctggctttcccccaggtctacatgttcctggtgaaatggcaggacctgtcggagaaggtggtctaccggcgcttcaccgagatatacg

SEQ ID NO: 25644 - RNA, 103 nt, synthetic construct
  source 1..103: mol_type = other RNA
tggggtcccccgactctggctttcccccaggtctacatgttcctggtgaaatggcaggacctgtcggagaaggtggtctaccggcgcttcaccgagatctacg

SEQ ID NO: 25645 - RNA, 103 nt, synthetic construct
  source 1..103: mol_type = other RNA
tggggtcccccgactctggctttcccccaggtctacatgttcctggtgaaatggcaggacctgtcggagaaggtggtctaccggcgcttcaccgagatttacg

SEQ ID NO: 25646 - RNA, 103 nt, synthetic construct
  source 1..103: mol_type = other RNA
tggggtcccccgactctggctttcccccaggtttacatgttcctggtgaaatggcaggacctgtcggagaaggtggtctaccggcgcttcaccgagatttacg

SEQ ID NO: 25647 - RNA, 103 nt, synthetic construct
  source 1..103: mol_type = other RNA
tggggtcccccgactctggctttcccccaggtgtacatgttcctggtgaaatggcaggacctgtcggagaaggtggtctaccggcgcttcaccgagatctacg

SEQ ID NO: 25648 - RNA, 20 nt, synthetic construct
  source 1..20: mol_type = other RNA
cggcgcttcaccgagatata

SEQ ID NO: 25649 - RNA, 20 nt, synthetic construct
  source 1..20: mol_type = other RNA
gcgcttcaccgagatttacg

SEQ ID NO: 25650 - RNA, 20 nt, synthetic construct
  source 1..20: mol_type = other RNA
cggcgcttcaccgagattta

SEQ ID NO: 25651 - RNA, 20 nt, synthetic construct
  source 1..20: mol_type = other RNA
gcgcttcaccgagatatacg

SEQ ID NO: 25652 - RNA, 16 nt, synthetic construct
  source 1..16: mol_type = other RNA
gtagatctcggtgaag

SEQ ID NO: 25653 - RNA, 17 nt, synthetic construct
  source 1..17: mol_type = other RNA
cgtagatctcggtgaag

SEQ ID NO: 25654 - RNA, 18 nt, synthetic construct
  source 1..18: mol_type = other RNA
tcgtagatctcggtgaag

SEQ ID NO: 25655 - RNA, 19 nt, synthetic construct
  source 1..19: mol_type = other RNA
ctcgtagatctcggtgaag

SEQ ID NO: 25656 - RNA, 20 nt, synthetic construct
  source 1..20: mol_type = other RNA
actcgtagatctcggtgaag

SEQ ID NO: 25657 - RNA, 21 nt, synthetic construct
  source 1..21: mol_type = other RNA
aactcgtagatctcggtgaag

SEQ ID NO: 25658 - RNA, 22 nt, synthetic construct
  source 1..22: mol_type = other RNA
gaactcgtagatctcggtgaag

SEQ ID NO: 25659-25665 - skipped (7 entries)

SEQ ID NO: 25666 - RNA, 10 nt, synthetic construct
  source 1..10: mol_type = other RNA
caccgagatc

SEQ ID NO: 25667 - RNA, 11 nt, synthetic construct
  source 1..11: mol_type = other RNA
caccgagatct

SEQ ID NO: 25668 - RNA, 12 nt, synthetic construct
  source 1..12: mol_type = other RNA
caccgagatcta

SEQ ID NO: 25669 - RNA, 13 nt, synthetic construct
  source 1..13: mol_type = other RNA
caccgagatctac

SEQ ID NO: 25670 - RNA, 14 nt, synthetic construct
  source 1..14: mol_type = other RNA
caccgagatctacg

SEQ ID NO: 25671 - RNA, 15 nt, synthetic construct
  source 1..15: mol_type = other RNA
caccgagatctacga

SEQ ID NO: 25672 - RNA, 16 nt, synthetic construct
  source 1..16: mol_type = other RNA
caccgagatctacgag

SEQ ID NO: 25673 - RNA, 17 nt, synthetic construct
  source 1..17: mol_type = other RNA
caccgagatctacgagt

SEQ ID NO: 25674 - RNA, 18 nt, synthetic construct
  source 1..18: mol_type = other RNA
caccgagatctacgagtt

SEQ ID NO: 25675 - RNA, 19 nt, synthetic construct
  source 1..19: mol_type = other RNA
caccgagatctacgagttc

SEQ ID NO: 25676 - RNA, 59 nt, synthetic construct
  source 1..59: mol_type = other RNA
gtctacatgttcctggtgaaatggcaggacctgtcggagaaggtggtctaccggagatt

SEQ ID NO: 25677 - RNA, 59 nt, synthetic construct
  source 1..59: mol_type = other RNA
gtttacatgttcctggtgaaatggcaggacctgtcggagaaggtggtctaccggaggtt

SEQ ID NO: 25678 - RNA, 59 nt, synthetic construct
  source 1..59: mol_type = other RNA
gtatacatgttcctggtgaaatggcaggacctgtcggagaaggtggtctaccggagatt

SEQ ID NO: 25679 - RNA, 59 nt, synthetic construct
  source 1..59: mol_type = other RNA
gtatacatgttcctggtgaaatggcaggacctgtcggagaaggtggtctaccggaggtt

SEQ ID NO: 25680 - RNA, 59 nt, synthetic construct
  source 1..59: mol_type = other RNA
gtatacatgttcctggtgaaatggcaggacctgtcggagaaggtggtctaccggcgctt

SEQ ID NO: 25681 - RNA, 59 nt, synthetic construct
  source 1..59: mol_type = other RNA
gtttacatgttcctggtgaaatggcaggacctgtcggagaaggtggtctaccggcgctt

SEQ ID NO: 25682 - RNA, 59 nt, synthetic construct
  source 1..59: mol_type = other RNA
gtttacatgttcctggtgaaatggcaggacctgtcggagaaggtggtctaccggagatt

SEQ ID NO: 25683 - RNA, 59 nt, synthetic construct
  source 1..59: mol_type = other RNA
gtctacatgttcctggtgaaatggcaggacctgtcggagaaggtggtctaccggaggtt

SEQ ID NO: 25684 - RNA, 59 nt, synthetic construct
  source 1..59: mol_type = other RNA
gtgtacatgttcctggtgaaatggcaggacctgtcggagaaggtggtctaccggagatt

SEQ ID NO: 25685 - RNA, 59 nt, synthetic construct
  source 1..59: mol_type = other RNA
gtctacatgttcctggtgaaatggcaggacctgtcggagaaggtggtctaccggcgctt

SEQ ID NO: 25686 - RNA, 59 nt, synthetic construct
  source 1..59: mol_type = other RNA
gtgtacatgttcctggtgaaatggcaggacctgtcggagaaggtggtctaccggcgctt

SEQ ID NO: 25687 - RNA, 59 nt, synthetic construct
  source 1..59: mol_type = other RNA
gtgtacatgttcctggtgaaatggcaggacctgtcggagaaggtggtctaccggaggtt

SEQ ID NO: 25688 - RNA, 60 nt, synthetic construct
  source 1..60: mol_type = other RNA
ggtttacatgttcctggtgaaatggcaggacctgtcggagaaggtggtctaccggagatt

SEQ ID NO: 25689 - RNA, 60 nt, synthetic construct
  source 1..60: mol_type = other RNA
ggtatacatgttcctggtgaaatggcaggacctgtcggagaaggtggtctaccggcgctt

SEQ ID NO: 25690 - RNA, 60 nt, synthetic construct
  source 1..60: mol_type = other RNA
ggtctacatgttcctggtgaaatggcaggacctgtcggagaaggtggtctaccggcgctt

SEQ ID NO: 25691 - RNA, 60 nt, synthetic construct
  source 1..60: mol_type = other RNA
ggtatacatgttcctggtgaaatggcaggacctgtcggagaaggtggtctaccggaggtt

SEQ ID NO: 25692 - RNA, 60 nt, synthetic construct
  source 1..60: mol_type = other RNA
ggtgtacatgttcctggtgaaatggcaggacctgtcggagaaggtggtctaccggaggtt

SEQ ID NO: 25693 - RNA, 60 nt, synthetic construct
  source 1..60: mol_type = other RNA
ggtgtacatgttcctggtgaaatggcaggacctgtcggagaaggtggtctaccggagatt

SEQ ID NO: 25694 - RNA, 60 nt, synthetic construct
  source 1..60: mol_type = other RNA
ggtgtacatgttcctggtgaaatggcaggacctgtcggagaaggtggtctaccggcgctt

SEQ ID NO: 25695 - RNA, 60 nt, synthetic construct
  source 1..60: mol_type = other RNA
ggtttacatgttcctggtgaaatggcaggacctgtcggagaaggtggtctaccggaggtt

SEQ ID NO: 25696 - RNA, 60 nt, synthetic construct
  source 1..60: mol_type = other RNA
ggtctacatgttcctggtgaaatggcaggacctgtcggagaaggtggtctaccggaggtt

SEQ ID NO: 25697 - RNA, 60 nt, synthetic construct
  source 1..60: mol_type = other RNA
ggtctacatgttcctggtgaaatggcaggacctgtcggagaaggtggtctaccggagatt

SEQ ID NO: 25698 - RNA, 60 nt, synthetic construct
  source 1..60: mol_type = other RNA
ggtatacatgttcctggtgaaatggcaggacctgtcggagaaggtggtctaccggagatt

SEQ ID NO: 25699 - RNA, 60 nt, synthetic construct
  source 1..60: mol_type = other RNA
ggtttacatgttcctggtgaaatggcaggacctgtcggagaaggtggtctaccggcgctt

SEQ ID NO: 25700 - RNA, 61 nt, synthetic construct
  source 1..61: mol_type = other RNA
aggtttacatgttcctggtgaaatggcaggacctgtcggagaaggtggtctaccggagatt

SEQ ID NO: 25701 - RNA, 61 nt, synthetic construct
  source 1..61: mol_type = other RNA
aggtttacatgttcctggtgaaatggcaggacctgtcggagaaggtggtctaccggcgctt

SEQ ID NO: 25702 - RNA, 61 nt, synthetic construct
  source 1..61: mol_type = other RNA
aggtgtacatgttcctggtgaaatggcaggacctgtcggagaaggtggtctaccggcgctt

SEQ ID NO: 25703 - RNA, 61 nt, synthetic construct
  source 1..61: mol_type = other RNA
aggtgtacatgttcctggtgaaatggcaggacctgtcggagaaggtggtctaccggaggtt

SEQ ID NO: 25704 - RNA, 61 nt, synthetic construct
  source 1..61: mol_type = other RNA
aggtttacatgttcctggtgaaatggcaggacctgtcggagaaggtggtctaccggaggtt

SEQ ID NO: 25705 - RNA, 61 nt, synthetic construct
  source 1..61: mol_type = other RNA
aggtctacatgttcctggtgaaatggcaggacctgtcggagaaggtggtctaccggaggtt

SEQ ID NO: 25706 - RNA, 61 nt, synthetic construct
  source 1..61: mol_type = other RNA
aggtgtacatgttcctggtgaaatggcaggacctgtcggagaaggtggtctaccggagatt

SEQ ID NO: 25707 - RNA, 61 nt, synthetic construct
  source 1..61: mol_type = other RNA
aggtctacatgttcctggtgaaatggcaggacctgtcggagaaggtggtctaccggcgctt

SEQ ID NO: 25708 - RNA, 61 nt, synthetic construct
  source 1..61: mol_type = other RNA
aggtatacatgttcctggtgaaatggcaggacctgtcggagaaggtggtctaccggagatt

SEQ ID NO: 25709 - RNA, 61 nt, synthetic construct
  source 1..61: mol_type = other RNA
aggtatacatgttcctggtgaaatggcaggacctgtcggagaaggtggtctaccggaggtt

SEQ ID NO: 25710 - RNA, 61 nt, synthetic construct
  source 1..61: mol_type = other RNA
aggtatacatgttcctggtgaaatggcaggacctgtcggagaaggtggtctaccggcgctt

SEQ ID NO: 25711 - RNA, 61 nt, synthetic construct
  source 1..61: mol_type = other RNA
aggtctacatgttcctggtgaaatggcaggacctgtcggagaaggtggtctaccggagatt

SEQ ID NO: 25712 - RNA, 62 nt, synthetic construct
  source 1..62: mol_type = other RNA
caggtttacatgttcctggtgaaatggcaggacctgtcggagaaggtggtctaccggcgctt

SEQ ID NO: 25713 - RNA, 62 nt, synthetic construct
  source 1..62: mol_type = other RNA
caggtttacatgttcctggtgaaatggcaggacctgtcggagaaggtggtctaccggagatt

SEQ ID NO: 25714 - RNA, 62 nt, synthetic construct
  source 1..62: mol_type = other RNA
caggtctacatgttcctggtgaaatggcaggacctgtcggagaaggtggtctaccggaggtt

SEQ ID NO: 25715 - RNA, 62 nt, synthetic construct
  source 1..62: mol_type = other RNA
caggtttacatgttcctggtgaaatggcaggacctgtcggagaaggtggtctaccggaggtt

SEQ ID NO: 25716 - RNA, 62 nt, synthetic construct
  source 1..62: mol_type = other RNA
caggtatacatgttcctggtgaaatggcaggacctgtcggagaaggtggtctaccggagatt

SEQ ID NO: 25717 - RNA, 62 nt, synthetic construct
  source 1..62: mol_type = other RNA
caggtatacatgttcctggtgaaatggcaggacctgtcggagaaggtggtctaccggaggtt

SEQ ID NO: 25718 - RNA, 62 nt, synthetic construct
  source 1..62: mol_type = other RNA
caggtctacatgttcctggtgaaatggcaggacctgtcggagaaggtggtctaccggagatt

SEQ ID NO: 25719 - RNA, 62 nt, synthetic construct
  source 1..62: mol_type = other RNA
caggtatacatgttcctggtgaaatggcaggacctgtcggagaaggtggtctaccggcgctt

SEQ ID NO: 25720 - RNA, 62 nt, synthetic construct
  source 1..62: mol_type = other RNA
caggtctacatgttcctggtgaaatggcaggacctgtcggagaaggtggtctaccggcgctt

SEQ ID NO: 25721 - RNA, 62 nt, synthetic construct
  source 1..62: mol_type = other RNA
caggtgtacatgttcctggtgaaatggcaggacctgtcggagaaggtggtctaccggaggtt

SEQ ID NO: 25722 - RNA, 62 nt, synthetic construct
  source 1..62: mol_type = other RNA
caggtgtacatgttcctggtgaaatggcaggacctgtcggagaaggtggtctaccggcgctt

SEQ ID NO: 25723 - RNA, 62 nt, synthetic construct
  source 1..62: mol_type = other RNA
caggtgtacatgttcctggtgaaatggcaggacctgtcggagaaggtggtctaccggagatt

SEQ ID NO: 25724 - RNA, 63 nt, synthetic construct
  source 1..63: mol_type = other RNA
ccaggtatacatgttcctggtgaaatggcaggacctgtcggagaaggtggtctaccggagatt

SEQ ID NO: 25725 - RNA, 63 nt, synthetic construct
  source 1..63: mol_type = other RNA
ccaggtctacatgttcctggtgaaatggcaggacctgtcggagaaggtggtctaccggaggtt

SEQ ID NO: 25726 - RNA, 63 nt, synthetic construct
  source 1..63: mol_type = other RNA
ccaggtgtacatgttcctggtgaaatggcaggacctgtcggagaaggtggtctaccggaggtt

SEQ ID NO: 25727 - RNA, 63 nt, synthetic construct
  source 1..63: mol_type = other RNA
ccaggtctacatgttcctggtgaaatggcaggacctgtcggagaaggtggtctaccggcgctt

SEQ ID NO: 25728 - RNA, 63 nt, synthetic construct
  source 1..63: mol_type = other RNA
ccaggtatacatgttcctggtgaaatggcaggacctgtcggagaaggtggtctaccggaggtt

SEQ ID NO: 25729 - RNA, 63 nt, synthetic construct
  source 1..63: mol_type = other RNA
ccaggtctacatgttcctggtgaaatggcaggacctgtcggagaaggtggtctaccggagatt

SEQ ID NO: 25730 - RNA, 63 nt, synthetic construct
  source 1..63: mol_type = other RNA
ccaggtatacatgttcctggtgaaatggcaggacctgtcggagaaggtggtctaccggcgctt

SEQ ID NO: 25731 - RNA, 63 nt, synthetic construct
  source 1..63: mol_type = other RNA
ccaggtgtacatgttcctggtgaaatggcaggacctgtcggagaaggtggtctaccggcgctt

SEQ ID NO: 25732 - RNA, 63 nt, synthetic construct
  source 1..63: mol_type = other RNA
ccaggtttacatgttcctggtgaaatggcaggacctgtcggagaaggtggtctaccggagatt

SEQ ID NO: 25733 - RNA, 63 nt, synthetic construct
  source 1..63: mol_type = other RNA
ccaggtttacatgttcctggtgaaatggcaggacctgtcggagaaggtggtctaccggcgctt

SEQ ID NO: 25734 - RNA, 63 nt, synthetic construct
  source 1..63: mol_type = other RNA
ccaggtttacatgttcctggtgaaatggcaggacctgtcggagaaggtggtctaccggaggtt

SEQ ID NO: 25735 - RNA, 63 nt, synthetic construct
  source 1..63: mol_type = other RNA
ccaggtgtacatgttcctggtgaaatggcaggacctgtcggagaaggtggtctaccggagatt

SEQ ID NO: 25736 - RNA, 64 nt, synthetic construct
  source 1..64: mol_type = other RNA
cccaggtgtacatgttcctggtgaaatggcaggacctgtcggagaaggtggtctaccggcgctt

SEQ ID NO: 25737 - RNA, 64 nt, synthetic construct
  source 1..64: mol_type = other RNA
cccaggtctacatgttcctggtgaaatggcaggacctgtcggagaaggtggtctaccggagatt

SEQ ID NO: 25738 - RNA, 64 nt, synthetic construct
  source 1..64: mol_type = other RNA
cccaggtgtacatgttcctggtgaaatggcaggacctgtcggagaaggtggtctaccggagatt

SEQ ID NO: 25739 - RNA, 64 nt, synthetic construct
  source 1..64: mol_type = other RNA
cccaggtctacatgttcctggtgaaatggcaggacctgtcggagaaggtggtctaccggcgctt

SEQ ID NO: 25740 - RNA, 64 nt, synthetic construct
  source 1..64: mol_type = other RNA
cccaggtttacatgttcctggtgaaatggcaggacctgtcggagaaggtggtctaccggaggtt

SEQ ID NO: 25741 - RNA, 64 nt, synthetic construct
  source 1..64: mol_type = other RNA
cccaggtttacatgttcctggtgaaatggcaggacctgtcggagaaggtggtctaccggagatt

SEQ ID NO: 25742 - RNA, 64 nt, synthetic construct
  source 1..64: mol_type = other RNA
cccaggtctacatgttcctggtgaaatggcaggacctgtcggagaaggtggtctaccggaggtt

SEQ ID NO: 25743 - RNA, 64 nt, synthetic construct
  source 1..64: mol_type = other RNA
cccaggtatacatgttcctggtgaaatggcaggacctgtcggagaaggtggtctaccggcgctt

SEQ ID NO: 25744 - RNA, 64 nt, synthetic construct
  source 1..64: mol_type = other RNA
cccaggtatacatgttcctggtgaaatggcaggacctgtcggagaaggtggtctaccggagatt

SEQ ID NO: 25745 - RNA, 64 nt, synthetic construct
  source 1..64: mol_type = other RNA
cccaggtttacatgttcctggtgaaatggcaggacctgtcggagaaggtggtctaccggcgctt

SEQ ID NO: 25746 - RNA, 64 nt, synthetic construct
  source 1..64: mol_type = other RNA
cccaggtgtacatgttcctggtgaaatggcaggacctgtcggagaaggtggtctaccggaggtt

SEQ ID NO: 25747 - RNA, 64 nt, synthetic construct
  source 1..64: mol_type = other RNA
cccaggtatacatgttcctggtgaaatggcaggacctgtcggagaaggtggtctaccggaggtt

SEQ ID NO: 25748 - RNA, 65 nt, synthetic construct
  source 1..65: mol_type = other RNA
ccccaggtgtacatgttcctggtgaaatggcaggacctgtcggagaaggtggtctaccggcgctt

SEQ ID NO: 25749 - RNA, 65 nt, synthetic construct
  source 1..65: mol_type = other RNA
ccccaggtctacatgttcctggtgaaatggcaggacctgtcggagaaggtggtctaccggagatt

SEQ ID NO: 25750 - RNA, 65 nt, synthetic construct
  source 1..65: mol_type = other RNA
ccccaggtctacatgttcctggtgaaatggcaggacctgtcggagaaggtggtctaccggaggtt

SEQ ID NO: 25751 - RNA, 65 nt, synthetic construct
  source 1..65: mol_type = other RNA
ccccaggtttacatgttcctggtgaaatggcaggacctgtcggagaaggtggtctaccggagatt

SEQ ID NO: 25752 - RNA, 65 nt, synthetic construct
  source 1..65: mol_type = other RNA
ccccaggtgtacatgttcctggtgaaatggcaggacctgtcggagaaggtggtctaccggaggtt

SEQ ID NO: 25753 - RNA, 65 nt, synthetic construct
  source 1..65: mol_type = other RNA
ccccaggtgtacatgttcctggtgaaatggcaggacctgtcggagaaggtggtctaccggagatt

SEQ ID NO: 25754 - RNA, 65 nt, synthetic construct
  source 1..65: mol_type = other RNA
ccccaggtttacatgttcctggtgaaatggcaggacctgtcggagaaggtggtctaccggaggtt

SEQ ID NO: 25755 - RNA, 65 nt, synthetic construct
  source 1..65: mol_type = other RNA
ccccaggtttacatgttcctggtgaaatggcaggacctgtcggagaaggtggtctaccggcgctt

SEQ ID NO: 25756 - RNA, 65 nt, synthetic construct
  source 1..65: mol_type = other RNA
ccccaggtctacatgttcctggtgaaatggcaggacctgtcggagaaggtggtctaccggcgctt

SEQ ID NO: 25757 - RNA, 65 nt, synthetic construct
  source 1..65: mol_type = other RNA
ccccaggtatacatgttcctggtgaaatggcaggacctgtcggagaaggtggtctaccggcgctt

SEQ ID NO: 25758 - RNA, 65 nt, synthetic construct
  source 1..65: mol_type = other RNA
ccccaggtatacatgttcctggtgaaatggcaggacctgtcggagaaggtggtctaccggagatt

SEQ ID NO: 25759 - RNA, 65 nt, synthetic construct
  source 1..65: mol_type = other RNA
ccccaggtatacatgttcctggtgaaatggcaggacctgtcggagaaggtggtctaccggaggtt

SEQ ID NO: 25760 - RNA, 66 nt, synthetic construct
  source 1..66: mol_type = other RNA
cccccaggtgtacatgttcctggtgaaatggcaggacctgtcggagaaggtggtctaccggaggtt

SEQ ID NO: 25761 - RNA, 66 nt, synthetic construct
  source 1..66: mol_type = other RNA
cccccaggtgtacatgttcctggtgaaatggcaggacctgtcggagaaggtggtctaccggcgctt

SEQ ID NO: 25762 - RNA, 66 nt, synthetic construct
  source 1..66: mol_type = other RNA
cccccaggtttacatgttcctggtgaaatggcaggacctgtcggagaaggtggtctaccggaggtt

SEQ ID NO: 25763 - RNA, 66 nt, synthetic construct
  source 1..66: mol_type = other RNA
cccccaggtgtacatgttcctggtgaaatggcaggacctgtcggagaaggtggtctaccggagatt

SEQ ID NO: 25764 - RNA, 66 nt, synthetic construct
  source 1..66: mol_type = other RNA
cccccaggtctacatgttcctggtgaaatggcaggacctgtcggagaaggtggtctaccggaggtt

SEQ ID NO: 25765 - RNA, 66 nt, synthetic construct
  source 1..66: mol_type = other RNA
cccccaggtctacatgttcctggtgaaatggcaggacctgtcggagaaggtggtctaccggcgctt

SEQ ID NO: 25766 - RNA, 66 nt, synthetic construct
  source 1..66: mol_type = other RNA
cccccaggtatacatgttcctggtgaaatggcaggacctgtcggagaaggtggtctaccggagatt

SEQ ID NO: 25767 - RNA, 66 nt, synthetic construct
  source 1..66: mol_type = other RNA
cccccaggtttacatgttcctggtgaaatggcaggacctgtcggagaaggtggtctaccggcgctt

SEQ ID NO: 25768 - RNA, 66 nt, synthetic construct
  source 1..66: mol_type = other RNA
cccccaggtatacatgttcctggtgaaatggcaggacctgtcggagaaggtggtctaccggaggtt

SEQ ID NO: 25769 - RNA, 66 nt, synthetic construct
  source 1..66: mol_type = other RNA
cccccaggtatacatgttcctggtgaaatggcaggacctgtcggagaaggtggtctaccggcgctt

SEQ ID NO: 25770 - RNA, 66 nt, synthetic construct
  source 1..66: mol_type = other RNA
cccccaggtttacatgttcctggtgaaatggcaggacctgtcggagaaggtggtctaccggagatt

SEQ ID NO: 25771 - RNA, 66 nt, synthetic construct
  source 1..66: mol_type = other RNA
cccccaggtctacatgttcctggtgaaatggcaggacctgtcggagaaggtggtctaccggagatt

SEQ ID NO: 25772 - RNA, 67 nt, synthetic construct
  source 1..67: mol_type = other RNA
tcccccaggtatacatgttcctggtgaaatggcaggacctgtcggagaaggtggtctaccggaggtt

SEQ ID NO: 25773 - RNA, 67 nt, synthetic construct
  source 1..67: mol_type = other RNA
tcccccaggtatacatgttcctggtgaaatggcaggacctgtcggagaaggtggtctaccggagatt

SEQ ID NO: 25774 - RNA, 67 nt, synthetic construct
  source 1..67: mol_type = other RNA
tcccccaggtgtacatgttcctggtgaaatggcaggacctgtcggagaaggtggtctaccggcgctt

SEQ ID NO: 25775 - RNA, 67 nt, synthetic construct
  source 1..67: mol_type = other RNA
tcccccaggtctacatgttcctggtgaaatggcaggacctgtcggagaaggtggtctaccggcgctt

SEQ ID NO: 25776 - RNA, 67 nt, synthetic construct
  source 1..67: mol_type = other RNA
tcccccaggtgtacatgttcctggtgaaatggcaggacctgtcggagaaggtggtctaccggagatt

SEQ ID NO: 25777 - RNA, 67 nt, synthetic construct
  source 1..67: mol_type = other RNA
tcccccaggtctacatgttcctggtgaaatggcaggacctgtcggagaaggtggtctaccggaggtt

SEQ ID NO: 25778 - RNA, 67 nt, synthetic construct
  source 1..67: mol_type = other RNA
tcccccaggtgtacatgttcctggtgaaatggcaggacctgtcggagaaggtggtctaccggaggtt

SEQ ID NO: 25779 - RNA, 67 nt, synthetic construct
  source 1..67: mol_type = other RNA
tcccccaggtttacatgttcctggtgaaatggcaggacctgtcggagaaggtggtctaccggagatt

SEQ ID NO: 25780 - RNA, 67 nt, synthetic construct
  source 1..67: mol_type = other RNA
tcccccaggtttacatgttcctggtgaaatggcaggacctgtcggagaaggtggtctaccggaggtt

SEQ ID NO: 25781 - RNA, 67 nt, synthetic construct
  source 1..67: mol_type = other RNA
tcccccaggtttacatgttcctggtgaaatggcaggacctgtcggagaaggtggtctaccggcgctt

SEQ ID NO: 25782 - RNA, 67 nt, synthetic construct
  source 1..67: mol_type = other RNA
tcccccaggtctacatgttcctggtgaaatggcaggacctgtcggagaaggtggtctaccggagatt

SEQ ID NO: 25783 - RNA, 67 nt, synthetic construct
  source 1..67: mol_type = other RNA
tcccccaggtatacatgttcctggtgaaatggcaggacctgtcggagaaggtggtctaccggcgctt

SEQ ID NO: 25784 - RNA, 68 nt, synthetic construct
  source 1..68: mol_type = other RNA
ttcccccaggtttacatgttcctggtgaaatggcaggacctgtcggagaaggtggtctaccggaggtt

SEQ ID NO: 25785 - RNA, 68 nt, synthetic construct
  source 1..68: mol_type = other RNA
ttcccccaggtttacatgttcctggtgaaatggcaggacctgtcggagaaggtggtctaccggagatt

SEQ ID NO: 25786 - RNA, 68 nt, synthetic construct
  source 1..68: mol_type = other RNA
ttcccccaggtgtacatgttcctggtgaaatggcaggacctgtcggagaaggtggtctaccggcgctt

SEQ ID NO: 25787 - RNA, 68 nt, synthetic construct
  source 1..68: mol_type = other RNA
ttcccccaggtgtacatgttcctggtgaaatggcaggacctgtcggagaaggtggtctaccggaggtt

SEQ ID NO: 25788 - RNA, 68 nt, synthetic construct
  source 1..68: mol_type = other RNA
ttcccccaggtgtacatgttcctggtgaaatggcaggacctgtcggagaaggtggtctaccggagatt

SEQ ID NO: 25789 - RNA, 68 nt, synthetic construct
  source 1..68: mol_type = other RNA
ttcccccaggtctacatgttcctggtgaaatggcaggacctgtcggagaaggtggtctaccggaggtt

SEQ ID NO: 25790 - RNA, 68 nt, synthetic construct
  source 1..68: mol_type = other RNA
ttcccccaggtctacatgttcctggtgaaatggcaggacctgtcggagaaggtggtctaccggagatt

SEQ ID NO: 25791 - RNA, 68 nt, synthetic construct
  source 1..68: mol_type = other RNA
ttcccccaggtatacatgttcctggtgaaatggcaggacctgtcggagaaggtggtctaccggcgctt

SEQ ID NO: 25792 - RNA, 68 nt, synthetic construct
  source 1..68: mol_type = other RNA
ttcccccaggtatacatgttcctggtgaaatggcaggacctgtcggagaaggtggtctaccggaggtt

SEQ ID NO: 25793 - RNA, 68 nt, synthetic construct
  source 1..68: mol_type = other RNA
ttcccccaggtctacatgttcctggtgaaatggcaggacctgtcggagaaggtggtctaccggcgctt

SEQ ID NO: 25794 - RNA, 68 nt, synthetic construct
  source 1..68: mol_type = other RNA
ttcccccaggtttacatgttcctggtgaaatggcaggacctgtcggagaaggtggtctaccggcgctt

SEQ ID NO: 25795 - RNA, 68 nt, synthetic construct
  source 1..68: mol_type = other RNA
ttcccccaggtatacatgttcctggtgaaatggcaggacctgtcggagaaggtggtctaccggagatt

SEQ ID NO: 25796 - RNA, 69 nt, synthetic construct
  source 1..69: mol_type = other RNA
tttcccccaggtatacatgttcctggtgaaatggcaggacctgtcggagaaggtggtctaccggaggtt

SEQ ID NO: 25797 - RNA, 69 nt, synthetic construct
  source 1..69: mol_type = other RNA
tttcccccaggtatacatgttcctggtgaaatggcaggacctgtcggagaaggtggtctaccggagatt

SEQ ID NO: 25798 - RNA, 69 nt, synthetic construct
  source 1..69: mol_type = other RNA
tttcccccaggtgtacatgttcctggtgaaatggcaggacctgtcggagaaggtggtctaccggagatt

SEQ ID NO: 25799 - RNA, 69 nt, synthetic construct
  source 1..69: mol_type = other RNA
tttcccccaggtttacatgttcctggtgaaatggcaggacctgtcggagaaggtggtctaccggaggtt

SEQ ID NO: 25800 - RNA, 69 nt, synthetic construct
  source 1..69: mol_type = other RNA
tttcccccaggtctacatgttcctggtgaaatggcaggacctgtcggagaaggtggtctaccggaggtt

SEQ ID NO: 25801 - RNA, 69 nt, synthetic construct
  source 1..69: mol_type = other RNA
tttcccccaggtgtacatgttcctggtgaaatggcaggacctgtcggagaaggtggtctaccggcgctt

SEQ ID NO: 25802 - RNA, 69 nt, synthetic construct
  source 1..69: mol_type = other RNA
tttcccccaggtgtacatgttcctggtgaaatggcaggacctgtcggagaaggtggtctaccggaggtt

SEQ ID NO: 25803 - RNA, 69 nt, synthetic construct
  source 1..69: mol_type = other RNA
tttcccccaggtttacatgttcctggtgaaatggcaggacctgtcggagaaggtggtctaccggagatt

SEQ ID NO: 25804 - RNA, 69 nt, synthetic construct
  source 1..69: mol_type = other RNA
tttcccccaggtctacatgttcctggtgaaatggcaggacctgtcggagaaggtggtctaccggcgctt

SEQ ID NO: 25805 - RNA, 69 nt, synthetic construct
  source 1..69: mol_type = other RNA
tttcccccaggtttacatgttcctggtgaaatggcaggacctgtcggagaaggtggtctaccggcgctt

SEQ ID NO: 25806 - RNA, 69 nt, synthetic construct
  source 1..69: mol_type = other RNA
tttcccccaggtctacatgttcctggtgaaatggcaggacctgtcggagaaggtggtctaccggagatt

SEQ ID NO: 25807 - RNA, 69 nt, synthetic construct
  source 1..69: mol_type = other RNA
tttcccccaggtatacatgttcctggtgaaatggcaggacctgtcggagaaggtggtctaccggcgctt

SEQ ID NO: 25808 - RNA, 70 nt, synthetic construct
  source 1..70: mol_type = other RNA
ctttcccccaggtttacatgttcctggtgaaatggcaggacctgtcggagaaggtggtctaccggaggtt

SEQ ID NO: 25809 - RNA, 70 nt, synthetic construct
  source 1..70: mol_type = other RNA
ctttcccccaggtttacatgttcctggtgaaatggcaggacctgtcggagaaggtggtctaccggcgctt

SEQ ID NO: 25810 - RNA, 70 nt, synthetic construct
  source 1..70: mol_type = other RNA
ctttcccccaggtgtacatgttcctggtgaaatggcaggacctgtcggagaaggtggtctaccggcgctt

SEQ ID NO: 25811 - RNA, 70 nt, synthetic construct
  source 1..70: mol_type = other RNA
ctttcccccaggtttacatgttcctggtgaaatggcaggacctgtcggagaaggtggtctaccggagatt

SEQ ID NO: 25812 - RNA, 70 nt, synthetic construct
  source 1..70: mol_type = other RNA
ctttcccccaggtgtacatgttcctggtgaaatggcaggacctgtcggagaaggtggtctaccggagatt

SEQ ID NO: 25813 - RNA, 70 nt, synthetic construct
  source 1..70: mol_type = other RNA
ctttcccccaggtctacatgttcctggtgaaatggcaggacctgtcggagaaggtggtctaccggcgctt

SEQ ID NO: 25814 - RNA, 70 nt, synthetic construct
  source 1..70: mol_type = other RNA
ctttcccccaggtctacatgttcctggtgaaatggcaggacctgtcggagaaggtggtctaccggaggtt

SEQ ID NO: 25815 - RNA, 70 nt, synthetic construct
  source 1..70: mol_type = other RNA
ctttcccccaggtctacatgttcctggtgaaatggcaggacctgtcggagaaggtggtctaccggagatt

SEQ ID NO: 25816 - RNA, 70 nt, synthetic construct
  source 1..70: mol_type = other RNA
ctttcccccaggtatacatgttcctggtgaaatggcaggacctgtcggagaaggtggtctaccggcgctt

SEQ ID NO: 25817 - RNA, 70 nt, synthetic construct
  source 1..70: mol_type = other RNA
ctttcccccaggtatacatgttcctggtgaaatggcaggacctgtcggagaaggtggtctaccggaggtt

SEQ ID NO: 25818 - RNA, 70 nt, synthetic construct
  source 1..70: mol_type = other RNA
ctttcccccaggtatacatgttcctggtgaaatggcaggacctgtcggagaaggtggtctaccggagatt

SEQ ID NO: 25819 - RNA, 70 nt, synthetic construct
  source 1..70: mol_type = other RNA
ctttcccccaggtgtacatgttcctggtgaaatggcaggacctgtcggagaaggtggtctaccggaggtt

SEQ ID NO: 25820 - RNA, 71 nt, synthetic construct
  source 1..71: mol_type = other RNA
gctttcccccaggtttacatgttcctggtgaaatggcaggacctgtcggagaaggtggtctaccggcgctt

SEQ ID NO: 25821 - RNA, 71 nt, synthetic construct
  source 1..71: mol_type = other RNA
gctttcccccaggtgtacatgttcctggtgaaatggcaggacctgtcggagaaggtggtctaccggcgctt

SEQ ID NO: 25822 - RNA, 71 nt, synthetic construct
  source 1..71: mol_type = other RNA
gctttcccccaggtgtacatgttcctggtgaaatggcaggacctgtcggagaaggtggtctaccggaggtt

SEQ ID NO: 25823 - RNA, 71 nt, synthetic construct
  source 1..71: mol_type = other RNA
gctttcccccaggtttacatgttcctggtgaaatggcaggacctgtcggagaaggtggtctaccggaggtt

SEQ ID NO: 25824 - RNA, 71 nt, synthetic construct
  source 1..71: mol_type = other RNA
gctttcccccaggtttacatgttcctggtgaaatggcaggacctgtcggagaaggtggtctaccggagatt

SEQ ID NO: 25825 - RNA, 71 nt, synthetic construct
  source 1..71: mol_type = other RNA
gctttcccccaggtgtacatgttcctggtgaaatggcaggacctgtcggagaaggtggtctaccggagatt

SEQ ID NO: 25826 - RNA, 71 nt, synthetic construct
  source 1..71: mol_type = other RNA
gctttcccccaggtatacatgttcctggtgaaatggcaggacctgtcggagaaggtggtctaccggaggtt

SEQ ID NO: 25827 - RNA, 71 nt, synthetic construct
  source 1..71: mol_type = other RNA
gctttcccccaggtatacatgttcctggtgaaatggcaggacctgtcggagaaggtggtctaccggcgctt

SEQ ID NO: 25828 - RNA, 71 nt, synthetic construct
  source 1..71: mol_type = other RNA
gctttcccccaggtctacatgttcctggtgaaatggcaggacctgtcggagaaggtggtctaccggaggtt

SEQ ID NO: 25829 - RNA, 71 nt, synthetic construct
  source 1..71: mol_type = other RNA
gctttcccccaggtctacatgttcctggtgaaatggcaggacctgtcggagaaggtggtctaccggagatt

SEQ ID NO: 25830 - RNA, 71 nt, synthetic construct
  source 1..71: mol_type = other RNA
gctttcccccaggtctacatgttcctggtgaaatggcaggacctgtcggagaaggtggtctaccggcgctt

SEQ ID NO: 25831 - RNA, 71 nt, synthetic construct
  source 1..71: mol_type = other RNA
gctttcccccaggtatacatgttcctggtgaaatggcaggacctgtcggagaaggtggtctaccggagatt

SEQ ID NO: 25832 - RNA, 72 nt, synthetic construct
  source 1..72: mol_type = other RNA
ggctttcccccaggtatacatgttcctggtgaaatggcaggacctgtcggagaaggtggtctaccggagatt

SEQ ID NO: 25833 - RNA, 72 nt, synthetic construct
  source 1..72: mol_type = other RNA
ggctttcccccaggtttacatgttcctggtgaaatggcaggacctgtcggagaaggtggtctaccggcgctt

SEQ ID NO: 25834 - RNA, 72 nt, synthetic construct
  source 1..72: mol_type = other RNA
ggctttcccccaggtgtacatgttcctggtgaaatggcaggacctgtcggagaaggtggtctaccggagatt

SEQ ID NO: 25835 - RNA, 72 nt, synthetic construct
  source 1..72: mol_type = other RNA
ggctttcccccaggtatacatgttcctggtgaaatggcaggacctgtcggagaaggtggtctaccggaggtt

SEQ ID NO: 25836 - RNA, 72 nt, synthetic construct
  source 1..72: mol_type = other RNA
ggctttcccccaggtctacatgttcctggtgaaatggcaggacctgtcggagaaggtggtctaccggaggtt

SEQ ID NO: 25837 - RNA, 72 nt, synthetic construct
  source 1..72: mol_type = other RNA
ggctttcccccaggtatacatgttcctggtgaaatggcaggacctgtcggagaaggtggtctaccggcgctt

SEQ ID NO: 25838 - RNA, 72 nt, synthetic construct
  source 1..72: mol_type = other RNA
ggctttcccccaggtctacatgttcctggtgaaatggcaggacctgtcggagaaggtggtctaccggcgctt

SEQ ID NO: 25839 - RNA, 72 nt, synthetic construct
  source 1..72: mol_type = other RNA
ggctttcccccaggtctacatgttcctggtgaaatggcaggacctgtcggagaaggtggtctaccggagatt

SEQ ID NO: 25840 - RNA, 72 nt, synthetic construct
  source 1..72: mol_type = other RNA
ggctttcccccaggtttacatgttcctggtgaaatggcaggacctgtcggagaaggtggtctaccggagatt

SEQ ID NO: 25841 - RNA, 72 nt, synthetic construct
  source 1..72: mol_type = other RNA
ggctttcccccaggtttacatgttcctggtgaaatggcaggacctgtcggagaaggtggtctaccggaggtt

SEQ ID NO: 25842 - RNA, 72 nt, synthetic construct
  source 1..72: mol_type = other RNA
ggctttcccccaggtgtacatgttcctggtgaaatggcaggacctgtcggagaaggtggtctaccggaggtt

SEQ ID NO: 25843 - RNA, 72 nt, synthetic construct
  source 1..72: mol_type = other RNA
ggctttcccccaggtgtacatgttcctggtgaaatggcaggacctgtcggagaaggtggtctaccggcgctt

SEQ ID NO: 25844 - RNA, 73 nt, synthetic construct
  source 1..73: mol_type = other RNA
tggctttcccccaggtctacatgttcctggtgaaatggcaggacctgtcggagaaggtggtctaccggaggtt

SEQ ID NO: 25845 - RNA, 73 nt, synthetic construct
  source 1..73: mol_type = other RNA
tggctttcccccaggtgtacatgttcctggtgaaatggcaggacctgtcggagaaggtggtctaccggcgctt

SEQ ID NO: 25846 - RNA, 73 nt, synthetic construct
  source 1..73: mol_type = other RNA
tggctttcccccaggtatacatgttcctggtgaaatggcaggacctgtcggagaaggtggtctaccggagatt

SEQ ID NO: 25847 - RNA, 73 nt, synthetic construct
  source 1..73: mol_type = other RNA
tggctttcccccaggtatacatgttcctggtgaaatggcaggacctgtcggagaaggtggtctaccggaggtt

SEQ ID NO: 25848 - RNA, 73 nt, synthetic construct
  source 1..73: mol_type = other RNA
tggctttcccccaggtttacatgttcctggtgaaatggcaggacctgtcggagaaggtggtctaccggagatt

SEQ ID NO: 25849 - RNA, 73 nt, synthetic construct
  source 1..73: mol_type = other RNA
tggctttcccccaggtctacatgttcctggtgaaatggcaggacctgtcggagaaggtggtctaccggagatt

SEQ ID NO: 25850 - RNA, 73 nt, synthetic construct
  source 1..73: mol_type = other RNA
tggctttcccccaggtatacatgttcctggtgaaatggcaggacctgtcggagaaggtggtctaccggcgctt

SEQ ID NO: 25851 - RNA, 73 nt, synthetic construct
  source 1..73: mol_type = other RNA
tggctttcccccaggtttacatgttcctggtgaaatggcaggacctgtcggagaaggtggtctaccggcgctt

SEQ ID NO: 25852 - RNA, 73 nt, synthetic construct
  source 1..73: mol_type = other RNA
tggctttcccccaggtctacatgttcctggtgaaatggcaggacctgtcggagaaggtggtctaccggcgctt

SEQ ID NO: 25853 - RNA, 73 nt, synthetic construct
  source 1..73: mol_type = other RNA
tggctttcccccaggtgtacatgttcctggtgaaatggcaggacctgtcggagaaggtggtctaccggagatt

SEQ ID NO: 25854 - RNA, 73 nt, synthetic construct
  source 1..73: mol_type = other RNA
tggctttcccccaggtgtacatgttcctggtgaaatggcaggacctgtcggagaaggtggtctaccggaggtt

SEQ ID NO: 25855 - RNA, 73 nt, synthetic construct
  source 1..73: mol_type = other RNA
tggctttcccccaggtttacatgttcctggtgaaatggcaggacctgtcggagaaggtggtctaccggaggtt

SEQ ID NO: 25856 - RNA, 74 nt, synthetic construct
  source 1..74: mol_type = other RNA
ctggctttcccccaggtctacatgttcctggtgaaatggcaggacctgtcggagaaggtggtctaccggaggtt

SEQ ID NO: 25857 - RNA, 74 nt, synthetic construct
  source 1..74: mol_type = other RNA
ctggctttcccccaggtatacatgttcctggtgaaatggcaggacctgtcggagaaggtggtctaccggagatt

SEQ ID NO: 25858 - RNA, 74 nt, synthetic construct
  source 1..74: mol_type = other RNA
ctggctttcccccaggtatacatgttcctggtgaaatggcaggacctgtcggagaaggtggtctaccggcgctt

SEQ ID NO: 25859 - RNA, 74 nt, synthetic construct
  source 1..74: mol_type = other RNA
ctggctttcccccaggtttacatgttcctggtgaaatggcaggacctgtcggagaaggtggtctaccggcgctt

SEQ ID NO: 25860 - RNA, 74 nt, synthetic construct
  source 1..74: mol_type = other RNA
ctggctttcccccaggtctacatgttcctggtgaaatggcaggacctgtcggagaaggtggtctaccggcgctt

SEQ ID NO: 25861 - RNA, 74 nt, synthetic construct
  source 1..74: mol_type = other RNA
ctggctttcccccaggtgtacatgttcctggtgaaatggcaggacctgtcggagaaggtggtctaccggagatt

SEQ ID NO: 25862 - RNA, 74 nt, synthetic construct
  source 1..74: mol_type = other RNA
ctggctttcccccaggtttacatgttcctggtgaaatggcaggacctgtcggagaaggtggtctaccggaggtt

SEQ ID NO: 25863 - RNA, 74 nt, synthetic construct
  source 1..74: mol_type = other RNA
ctggctttcccccaggtttacatgttcctggtgaaatggcaggacctgtcggagaaggtggtctaccggagatt

SEQ ID NO: 25864 - RNA, 74 nt, synthetic construct
  source 1..74: mol_type = other RNA
ctggctttcccccaggtgtacatgttcctggtgaaatggcaggacctgtcggagaaggtggtctaccggaggtt

SEQ ID NO: 25865 - RNA, 74 nt, synthetic construct
  source 1..74: mol_type = other RNA
ctggctttcccccaggtgtacatgttcctggtgaaatggcaggacctgtcggagaaggtggtctaccggcgctt

SEQ ID NO: 25866 - RNA, 74 nt, synthetic construct
  source 1..74: mol_type = other RNA
ctggctttcccccaggtatacatgttcctggtgaaatggcaggacctgtcggagaaggtggtctaccggaggtt

SEQ ID NO: 25867 - RNA, 74 nt, synthetic construct
  source 1..74: mol_type = other RNA
ctggctttcccccaggtctacatgttcctggtgaaatggcaggacctgtcggagaaggtggtctaccggagatt

SEQ ID NO: 25868 - RNA, 75 nt, synthetic construct
  source 1..75: mol_type = other RNA
tctggctttcccccaggtgtacatgttcctggtgaaatggcaggacctgtcggagaaggtggtctaccggcgctt

SEQ ID NO: 25869 - RNA, 75 nt, synthetic construct
  source 1..75: mol_type = other RNA
tctggctttcccccaggtatacatgttcctggtgaaatggcaggacctgtcggagaaggtggtctaccggaggtt

SEQ ID NO: 25870 - RNA, 75 nt, synthetic construct
  source 1..75: mol_type = other RNA
tctggctttcccccaggtttacatgttcctggtgaaatggcaggacctgtcggagaaggtggtctaccggcgctt

SEQ ID NO: 25871 - RNA, 75 nt, synthetic construct
  source 1..75: mol_type = other RNA
tctggctttcccccaggtttacatgttcctggtgaaatggcaggacctgtcggagaaggtggtctaccggaggtt

SEQ ID NO: 25872 - RNA, 75 nt, synthetic construct
  source 1..75: mol_type = other RNA
tctggctttcccccaggtttacatgttcctggtgaaatggcaggacctgtcggagaaggtggtctaccggagatt

SEQ ID NO: 25873 - RNA, 75 nt, synthetic construct
  source 1..75: mol_type = other RNA
tctggctttcccccaggtgtacatgttcctggtgaaatggcaggacctgtcggagaaggtggtctaccggagatt

SEQ ID NO: 25874 - RNA, 75 nt, synthetic construct
  source 1..75: mol_type = other RNA
tctggctttcccccaggtatacatgttcctggtgaaatggcaggacctgtcggagaaggtggtctaccggcgctt

SEQ ID NO: 25875 - RNA, 75 nt, synthetic construct
  source 1..75: mol_type = other RNA
tctggctttcccccaggtatacatgttcctggtgaaatggcaggacctgtcggagaaggtggtctaccggagatt

SEQ ID NO: 25876 - RNA, 75 nt, synthetic construct
  source 1..75: mol_type = other RNA
tctggctttcccccaggtctacatgttcctggtgaaatggcaggacctgtcggagaaggtggtctaccggagatt

SEQ ID NO: 25877 - RNA, 75 nt, synthetic construct
  source 1..75: mol_type = other RNA
tctggctttcccccaggtctacatgttcctggtgaaatggcaggacctgtcggagaaggtggtctaccggaggtt

SEQ ID NO: 25878 - RNA, 75 nt, synthetic construct
  source 1..75: mol_type = other RNA
tctggctttcccccaggtctacatgttcctggtgaaatggcaggacctgtcggagaaggtggtctaccggcgctt

SEQ ID NO: 25879 - RNA, 75 nt, synthetic construct
  source 1..75: mol_type = other RNA
tctggctttcccccaggtgtacatgttcctggtgaaatggcaggacctgtcggagaaggtggtctaccggaggtt

SEQ ID NO: 25880 - RNA, 76 nt, synthetic construct
  source 1..76: mol_type = other RNA
ctctggctttcccccaggtctacatgttcctggtgaaatggcaggacctgtcggagaaggtggtctaccggcgctt

SEQ ID NO: 25881 - RNA, 76 nt, synthetic construct
  source 1..76: mol_type = other RNA
ctctggctttcccccaggtatacatgttcctggtgaaatggcaggacctgtcggagaaggtggtctaccggcgctt

SEQ ID NO: 25882 - RNA, 76 nt, synthetic construct
  source 1..76: mol_type = other RNA
ctctggctttcccccaggtatacatgttcctggtgaaatggcaggacctgtcggagaaggtggtctaccggaggtt

SEQ ID NO: 25883 - RNA, 76 nt, synthetic construct
  source 1..76: mol_type = other RNA
ctctggctttcccccaggtgtacatgttcctggtgaaatggcaggacctgtcggagaaggtggtctaccggagatt

SEQ ID NO: 25884 - RNA, 76 nt, synthetic construct
  source 1..76: mol_type = other RNA
ctctggctttcccccaggtatacatgttcctggtgaaatggcaggacctgtcggagaaggtggtctaccggagatt

SEQ ID NO: 25885 - RNA, 76 nt, synthetic construct
  source 1..76: mol_type = other RNA
ctctggctttcccccaggtgtacatgttcctggtgaaatggcaggacctgtcggagaaggtggtctaccggaggtt

SEQ ID NO: 25886 - RNA, 76 nt, synthetic construct
  source 1..76: mol_type = other RNA
ctctggctttcccccaggtgtacatgttcctggtgaaatggcaggacctgtcggagaaggtggtctaccggcgctt

SEQ ID NO: 25887 - RNA, 76 nt, synthetic construct
  source 1..76: mol_type = other RNA
ctctggctttcccccaggtttacatgttcctggtgaaatggcaggacctgtcggagaaggtggtctaccggagatt

SEQ ID NO: 25888 - RNA, 76 nt, synthetic construct
  source 1..76: mol_type = other RNA
ctctggctttcccccaggtttacatgttcctggtgaaatggcaggacctgtcggagaaggtggtctaccggaggtt

SEQ ID NO: 25889 - RNA, 76 nt, synthetic construct
  source 1..76: mol_type = other RNA
ctctggctttcccccaggtctacatgttcctggtgaaatggcaggacctgtcggagaaggtggtctaccggaggtt

SEQ ID NO: 25890 - RNA, 76 nt, synthetic construct
  source 1..76: mol_type = other RNA
ctctggctttcccccaggtttacatgttcctggtgaaatggcaggacctgtcggagaaggtggtctaccggcgctt

SEQ ID NO: 25891 - RNA, 76 nt, synthetic construct
  source 1..76: mol_type = other RNA
ctctggctttcccccaggtctacatgttcctggtgaaatggcaggacctgtcggagaaggtggtctaccggagatt

SEQ ID NO: 25892 - RNA, 77 nt, synthetic construct
  source 1..77: mol_type = other RNA
actctggctttcccccaggtctacatgttcctggtgaaatggcaggacctgtcggagaaggtggtctaccggaggtt

SEQ ID NO: 25893 - RNA, 77 nt, synthetic construct
  source 1..77: mol_type = other RNA
actctggctttcccccaggtttacatgttcctggtgaaatggcaggacctgtcggagaaggtggtctaccggaggtt

SEQ ID NO: 25894 - RNA, 77 nt, synthetic construct
  source 1..77: mol_type = other RNA
actctggctttcccccaggtatacatgttcctggtgaaatggcaggacctgtcggagaaggtggtctaccggcgctt

SEQ ID NO: 25895 - RNA, 77 nt, synthetic construct
  source 1..77: mol_type = other RNA
actctggctttcccccaggtttacatgttcctggtgaaatggcaggacctgtcggagaaggtggtctaccggagatt

SEQ ID NO: 25896 - RNA, 77 nt, synthetic construct
  source 1..77: mol_type = other RNA
actctggctttcccccaggtgtacatgttcctggtgaaatggcaggacctgtcggagaaggtggtctaccggcgctt

SEQ ID NO: 25897 - RNA, 77 nt, synthetic construct
  source 1..77: mol_type = other RNA
actctggctttcccccaggtatacatgttcctggtgaaatggcaggacctgtcggagaaggtggtctaccggagatt

SEQ ID NO: 25898 - RNA, 77 nt, synthetic construct
  source 1..77: mol_type = other RNA
actctggctttcccccaggtatacatgttcctggtgaaatggcaggacctgtcggagaaggtggtctaccggaggtt

SEQ ID NO: 25899 - RNA, 77 nt, synthetic construct
  source 1..77: mol_type = other RNA
actctggctttcccccaggtttacatgttcctggtgaaatggcaggacctgtcggagaaggtggtctaccggcgctt

SEQ ID NO: 25900 - RNA, 77 nt, synthetic construct
  source 1..77: mol_type = other RNA
actctggctttcccccaggtctacatgttcctggtgaaatggcaggacctgtcggagaaggtggtctaccggagatt

SEQ ID NO: 25901 - RNA, 77 nt, synthetic construct
  source 1..77: mol_type = other RNA
actctggctttcccccaggtgtacatgttcctggtgaaatggcaggacctgtcggagaaggtggtctaccggagatt

SEQ ID NO: 25902 - RNA, 77 nt, synthetic construct
  source 1..77: mol_type = other RNA
actctggctttcccccaggtctacatgttcctggtgaaatggcaggacctgtcggagaaggtggtctaccggcgctt

SEQ ID NO: 25903 - RNA, 77 nt, synthetic construct
  source 1..77: mol_type = other RNA
actctggctttcccccaggtgtacatgttcctggtgaaatggcaggacctgtcggagaaggtggtctaccggaggtt

SEQ ID NO: 25904 - RNA, 78 nt, synthetic construct
  source 1..78: mol_type = other RNA
gactctggctttcccccaggtatacatgttcctggtgaaatggcaggacctgtcggagaaggtggtctaccggaggtt

SEQ ID NO: 25905 - RNA, 78 nt, synthetic construct
  source 1..78: mol_type = other RNA
gactctggctttcccccaggtttacatgttcctggtgaaatggcaggacctgtcggagaaggtggtctaccggaggtt

SEQ ID NO: 25906 - RNA, 78 nt, synthetic construct
  source 1..78: mol_type = other RNA
gactctggctttcccccaggtgtacatgttcctggtgaaatggcaggacctgtcggagaaggtggtctaccggaggtt

SEQ ID NO: 25907 - RNA, 78 nt, synthetic construct
  source 1..78: mol_type = other RNA
gactctggctttcccccaggtatacatgttcctggtgaaatggcaggacctgtcggagaaggtggtctaccggcgctt

SEQ ID NO: 25908 - RNA, 78 nt, synthetic construct
  source 1..78: mol_type = other RNA
gactctggctttcccccaggtttacatgttcctggtgaaatggcaggacctgtcggagaaggtggtctaccggagatt

SEQ ID NO: 25909 - RNA, 78 nt, synthetic construct
  source 1..78: mol_type = other RNA
gactctggctttcccccaggtatacatgttcctggtgaaatggcaggacctgtcggagaaggtggtctaccggagatt

SEQ ID NO: 25910 - RNA, 78 nt, synthetic construct
  source 1..78: mol_type = other RNA
gactctggctttcccccaggtgtacatgttcctggtgaaatggcaggacctgtcggagaaggtggtctaccggcgctt

SEQ ID NO: 25911 - RNA, 78 nt, synthetic construct
  source 1..78: mol_type = other RNA
gactctggctttcccccaggtctacatgttcctggtgaaatggcaggacctgtcggagaaggtggtctaccggcgctt

SEQ ID NO: 25912 - RNA, 78 nt, synthetic construct
  source 1..78: mol_type = other RNA
gactctggctttcccccaggtttacatgttcctggtgaaatggcaggacctgtcggagaaggtggtctaccggcgctt

SEQ ID NO: 25913 - RNA, 78 nt, synthetic construct
  source 1..78: mol_type = other RNA
gactctggctttcccccaggtctacatgttcctggtgaaatggcaggacctgtcggagaaggtggtctaccggagatt

SEQ ID NO: 25914 - RNA, 78 nt, synthetic construct
  source 1..78: mol_type = other RNA
gactctggctttcccccaggtctacatgttcctggtgaaatggcaggacctgtcggagaaggtggtctaccggaggtt

SEQ ID NO: 25915 - RNA, 78 nt, synthetic construct
  source 1..78: mol_type = other RNA
gactctggctttcccccaggtgtacatgttcctggtgaaatggcaggacctgtcggagaaggtggtctaccggagatt

SEQ ID NO: 25916 - RNA, 79 nt, synthetic construct
  source 1..79: mol_type = other RNA
cgactctggctttcccccaggtttacatgttcctggtgaaatggcaggacctgtcggagaaggtggtctaccggagatt

SEQ ID NO: 25917 - RNA, 79 nt, synthetic construct
  source 1..79: mol_type = other RNA
cgactctggctttcccccaggtctacatgttcctggtgaaatggcaggacctgtcggagaaggtggtctaccggcgctt

SEQ ID NO: 25918 - RNA, 79 nt, synthetic construct
  source 1..79: mol_type = other RNA
cgactctggctttcccccaggtatacatgttcctggtgaaatggcaggacctgtcggagaaggtggtctaccggaggtt

SEQ ID NO: 25919 - RNA, 79 nt, synthetic construct
  source 1..79: mol_type = other RNA
cgactctggctttcccccaggtctacatgttcctggtgaaatggcaggacctgtcggagaaggtggtctaccggagatt

SEQ ID NO: 25920 - RNA, 79 nt, synthetic construct
  source 1..79: mol_type = other RNA
cgactctggctttcccccaggtatacatgttcctggtgaaatggcaggacctgtcggagaaggtggtctaccggcgctt

SEQ ID NO: 25921 - RNA, 79 nt, synthetic construct
  source 1..79: mol_type = other RNA
cgactctggctttcccccaggtttacatgttcctggtgaaatggcaggacctgtcggagaaggtggtctaccggaggtt

SEQ ID NO: 25922 - RNA, 79 nt, synthetic construct
  source 1..79: mol_type = other RNA
cgactctggctttcccccaggtatacatgttcctggtgaaatggcaggacctgtcggagaaggtggtctaccggagatt

SEQ ID NO: 25923 - RNA, 79 nt, synthetic construct
  source 1..79: mol_type = other RNA
cgactctggctttcccccaggtctacatgttcctggtgaaatggcaggacctgtcggagaaggtggtctaccggaggtt

SEQ ID NO: 25924 - RNA, 79 nt, synthetic construct
  source 1..79: mol_type = other RNA
cgactctggctttcccccaggtttacatgttcctggtgaaatggcaggacctgtcggagaaggtggtctaccggcgctt

SEQ ID NO: 25925 - RNA, 79 nt, synthetic construct
  source 1..79: mol_type = other RNA
cgactctggctttcccccaggtgtacatgttcctggtgaaatggcaggacctgtcggagaaggtggtctaccggaggtt

SEQ ID NO: 25926 - RNA, 79 nt, synthetic construct
  source 1..79: mol_type = other RNA
cgactctggctttcccccaggtgtacatgttcctggtgaaatggcaggacctgtcggagaaggtggtctaccggcgctt

SEQ ID NO: 25927 - RNA, 79 nt, synthetic construct
  source 1..79: mol_type = other RNA
cgactctggctttcccccaggtgtacatgttcctggtgaaatggcaggacctgtcggagaaggtggtctaccggagatt

SEQ ID NO: 25928 - RNA, 80 nt, synthetic construct
  source 1..80: mol_type = other RNA
ccgactctggctttcccccaggtttacatgttcctggtgaaatggcaggacctgtcggagaaggtggtctaccggagatt

SEQ ID NO: 25929 - RNA, 80 nt, synthetic construct
  source 1..80: mol_type = other RNA
ccgactctggctttcccccaggtctacatgttcctggtgaaatggcaggacctgtcggagaaggtggtctaccggcgctt

SEQ ID NO: 25930 - RNA, 80 nt, synthetic construct
  source 1..80: mol_type = other RNA
ccgactctggctttcccccaggtatacatgttcctggtgaaatggcaggacctgtcggagaaggtggtctaccggaggtt

SEQ ID NO: 25931 - RNA, 80 nt, synthetic construct
  source 1..80: mol_type = other RNA
ccgactctggctttcccccaggtatacatgttcctggtgaaatggcaggacctgtcggagaaggtggtctaccggagatt

SEQ ID NO: 25932 - RNA, 80 nt, synthetic construct
  source 1..80: mol_type = other RNA
ccgactctggctttcccccaggtttacatgttcctggtgaaatggcaggacctgtcggagaaggtggtctaccggaggtt

SEQ ID NO: 25933 - RNA, 80 nt, synthetic construct
  source 1..80: mol_type = other RNA
ccgactctggctttcccccaggtttacatgttcctggtgaaatggcaggacctgtcggagaaggtggtctaccggcgctt

SEQ ID NO: 25934 - RNA, 80 nt, synthetic construct
  source 1..80: mol_type = other RNA
ccgactctggctttcccccaggtgtacatgttcctggtgaaatggcaggacctgtcggagaaggtggtctaccggagatt

SEQ ID NO: 25935 - RNA, 80 nt, synthetic construct
  source 1..80: mol_type = other RNA
ccgactctggctttcccccaggtgtacatgttcctggtgaaatggcaggacctgtcggagaaggtggtctaccggcgctt

SEQ ID NO: 25936 - RNA, 80 nt, synthetic construct
  source 1..80: mol_type = other RNA
ccgactctggctttcccccaggtgtacatgttcctggtgaaatggcaggacctgtcggagaaggtggtctaccggaggtt

SEQ ID NO: 25937 - RNA, 80 nt, synthetic construct
  source 1..80: mol_type = other RNA
ccgactctggctttcccccaggtctacatgttcctggtgaaatggcaggacctgtcggagaaggtggtctaccggaggtt

SEQ ID NO: 25938 - RNA, 80 nt, synthetic construct
  source 1..80: mol_type = other RNA
ccgactctggctttcccccaggtctacatgttcctggtgaaatggcaggacctgtcggagaaggtggtctaccggagatt

SEQ ID NO: 25939 - RNA, 80 nt, synthetic construct
  source 1..80: mol_type = other RNA
ccgactctggctttcccccaggtatacatgttcctggtgaaatggcaggacctgtcggagaaggtggtctaccggcgctt

SEQ ID NO: 25940 - RNA, 81 nt, synthetic construct
  source 1..81: mol_type = other RNA
cccgactctggctttcccccaggtttacatgttcctggtgaaatggcaggacctgtcggagaaggtggtctaccggaggtt

SEQ ID NO: 25941 - RNA, 81 nt, synthetic construct
  source 1..81: mol_type = other RNA
cccgactctggctttcccccaggtgtacatgttcctggtgaaatggcaggacctgtcggagaaggtggtctaccggcgctt

SEQ ID NO: 25942 - RNA, 81 nt, synthetic construct
  source 1..81: mol_type = other RNA
cccgactctggctttcccccaggtgtacatgttcctggtgaaatggcaggacctgtcggagaaggtggtctaccggaggtt

SEQ ID NO: 25943 - RNA, 81 nt, synthetic construct
  source 1..81: mol_type = other RNA
cccgactctggctttcccccaggtctacatgttcctggtgaaatggcaggacctgtcggagaaggtggtctaccggaggtt

SEQ ID NO: 25944 - RNA, 81 nt, synthetic construct
  source 1..81: mol_type = other RNA
cccgactctggctttcccccaggtctacatgttcctggtgaaatggcaggacctgtcggagaaggtggtctaccggcgctt

SEQ ID NO: 25945 - RNA, 81 nt, synthetic construct
  source 1..81: mol_type = other RNA
cccgactctggctttcccccaggtatacatgttcctggtgaaatggcaggacctgtcggagaaggtggtctaccggagatt

SEQ ID NO: 25946 - RNA, 81 nt, synthetic construct
  source 1..81: mol_type = other RNA
cccgactctggctttcccccaggtctacatgttcctggtgaaatggcaggacctgtcggagaaggtggtctaccggagatt

SEQ ID NO: 25947 - RNA, 81 nt, synthetic construct
  source 1..81: mol_type = other RNA
cccgactctggctttcccccaggtatacatgttcctggtgaaatggcaggacctgtcggagaaggtggtctaccggaggtt

SEQ ID NO: 25948 - RNA, 81 nt, synthetic construct
  source 1..81: mol_type = other RNA
cccgactctggctttcccccaggtttacatgttcctggtgaaatggcaggacctgtcggagaaggtggtctaccggcgctt

SEQ ID NO: 25949 - RNA, 81 nt, synthetic construct
  source 1..81: mol_type = other RNA
cccgactctggctttcccccaggtgtacatgttcctggtgaaatggcaggacctgtcggagaaggtggtctaccggagatt

SEQ ID NO: 25950 - RNA, 81 nt, synthetic construct
  source 1..81: mol_type = other RNA
cccgactctggctttcccccaggtttacatgttcctggtgaaatggcaggacctgtcggagaaggtggtctaccggagatt

SEQ ID NO: 25951 - RNA, 81 nt, synthetic construct
  source 1..81: mol_type = other RNA
cccgactctggctttcccccaggtatacatgttcctggtgaaatggcaggacctgtcggagaaggtggtctaccggcgctt

SEQ ID NO: 25952 - RNA, 82 nt, synthetic construct
  source 1..82: mol_type = other RNA
ccccgactctggctttcccccaggtatacatgttcctggtgaaatggcaggacctgtcggagaaggtggtctaccggaggtt

SEQ ID NO: 25953 - RNA, 82 nt, synthetic construct
  source 1..82: mol_type = other RNA
ccccgactctggctttcccccaggtatacatgttcctggtgaaatggcaggacctgtcggagaaggtggtctaccggcgctt

SEQ ID NO: 25954 - RNA, 82 nt, synthetic construct
  source 1..82: mol_type = other RNA
ccccgactctggctttcccccaggtttacatgttcctggtgaaatggcaggacctgtcggagaaggtggtctaccggcgctt

SEQ ID NO: 25955 - RNA, 82 nt, synthetic construct
  source 1..82: mol_type = other RNA
ccccgactctggctttcccccaggtttacatgttcctggtgaaatggcaggacctgtcggagaaggtggtctaccggagatt

SEQ ID NO: 25956 - RNA, 82 nt, synthetic construct
  source 1..82: mol_type = other RNA
ccccgactctggctttcccccaggtgtacatgttcctggtgaaatggcaggacctgtcggagaaggtggtctaccggaggtt

SEQ ID NO: 25957 - RNA, 82 nt, synthetic construct
  source 1..82: mol_type = other RNA
ccccgactctggctttcccccaggtgtacatgttcctggtgaaatggcaggacctgtcggagaaggtggtctaccggagatt

SEQ ID NO: 25958 - RNA, 82 nt, synthetic construct
  source 1..82: mol_type = other RNA
ccccgactctggctttcccccaggtctacatgttcctggtgaaatggcaggacctgtcggagaaggtggtctaccggagatt

SEQ ID NO: 25959 - RNA, 82 nt, synthetic construct
  source 1..82: mol_type = other RNA
ccccgactctggctttcccccaggtctacatgttcctggtgaaatggcaggacctgtcggagaaggtggtctaccggaggtt

SEQ ID NO: 25960 - RNA, 82 nt, synthetic construct
  source 1..82: mol_type = other RNA
ccccgactctggctttcccccaggtatacatgttcctggtgaaatggcaggacctgtcggagaaggtggtctaccggagatt

SEQ ID NO: 25961 - RNA, 82 nt, synthetic construct
  source 1..82: mol_type = other RNA
ccccgactctggctttcccccaggtctacatgttcctggtgaaatggcaggacctgtcggagaaggtggtctaccggcgctt

SEQ ID NO: 25962 - RNA, 82 nt, synthetic construct
  source 1..82: mol_type = other RNA
ccccgactctggctttcccccaggtttacatgttcctggtgaaatggcaggacctgtcggagaaggtggtctaccggaggtt

SEQ ID NO: 25963 - RNA, 82 nt, synthetic construct
  source 1..82: mol_type = other RNA
ccccgactctggctttcccccaggtgtacatgttcctggtgaaatggcaggacctgtcggagaaggtggtctaccggcgctt

SEQ ID NO: 25964 - RNA, 83 nt, synthetic construct
  source 1..83: mol_type = other RNA
cccccgactctggctttcccccaggtctacatgttcctggtgaaatggcaggacctgtcggagaaggtggtctaccggcgctt

SEQ ID NO: 25965 - RNA, 83 nt, synthetic construct
  source 1..83: mol_type = other RNA
cccccgactctggctttcccccaggtatacatgttcctggtgaaatggcaggacctgtcggagaaggtggtctaccggagatt

SEQ ID NO: 25966 - RNA, 83 nt, synthetic construct
  source 1..83: mol_type = other RNA
cccccgactctggctttcccccaggtatacatgttcctggtgaaatggcaggacctgtcggagaaggtggtctaccggaggtt

SEQ ID NO: 25967 - RNA, 83 nt, synthetic construct
  source 1..83: mol_type = other RNA
cccccgactctggctttcccccaggtttacatgttcctggtgaaatggcaggacctgtcggagaaggtggtctaccggagatt

SEQ ID NO: 25968 - RNA, 83 nt, synthetic construct
  source 1..83: mol_type = other RNA
cccccgactctggctttcccccaggtttacatgttcctggtgaaatggcaggacctgtcggagaaggtggtctaccggaggtt

SEQ ID NO: 25969 - RNA, 83 nt, synthetic construct
  source 1..83: mol_type = other RNA
cccccgactctggctttcccccaggtgtacatgttcctggtgaaatggcaggacctgtcggagaaggtggtctaccggcgctt

SEQ ID NO: 25970 - RNA, 83 nt, synthetic construct
  source 1..83: mol_type = other RNA
cccccgactctggctttcccccaggtgtacatgttcctggtgaaatggcaggacctgtcggagaaggtggtctaccggaggtt

SEQ ID NO: 25971 - RNA, 83 nt, synthetic construct
  source 1..83: mol_type = other RNA
cccccgactctggctttcccccaggtttacatgttcctggtgaaatggcaggacctgtcggagaaggtggtctaccggcgctt

SEQ ID NO: 25972 - RNA, 83 nt, synthetic construct
  source 1..83: mol_type = other RNA
cccccgactctggctttcccccaggtgtacatgttcctggtgaaatggcaggacctgtcggagaaggtggtctaccggagatt

SEQ ID NO: 25973 - RNA, 83 nt, synthetic construct
  source 1..83: mol_type = other RNA
cccccgactctggctttcccccaggtatacatgttcctggtgaaatggcaggacctgtcggagaaggtggtctaccggcgctt

SEQ ID NO: 25974 - RNA, 83 nt, synthetic construct
  source 1..83: mol_type = other RNA
cccccgactctggctttcccccaggtctacatgttcctggtgaaatggcaggacctgtcggagaaggtggtctaccggaggtt

SEQ ID NO: 25975 - RNA, 83 nt, synthetic construct
  source 1..83: mol_type = other RNA
cccccgactctggctttcccccaggtctacatgttcctggtgaaatggcaggacctgtcggagaaggtggtctaccggagatt

SEQ ID NO: 25976 - RNA, 84 nt, synthetic construct
  source 1..84: mol_type = other RNA
tcccccgactctggctttcccccaggtctacatgttcctggtgaaatggcaggacctgtcggagaaggtggtctaccggaggtt

SEQ ID NO: 25977 - RNA, 84 nt, synthetic construct
  source 1..84: mol_type = other RNA
tcccccgactctggctttcccccaggtctacatgttcctggtgaaatggcaggacctgtcggagaaggtggtctaccggagatt

SEQ ID NO: 25978 - RNA, 84 nt, synthetic construct
  source 1..84: mol_type = other RNA
tcccccgactctggctttcccccaggtatacatgttcctggtgaaatggcaggacctgtcggagaaggtggtctaccggagatt

SEQ ID NO: 25979 - RNA, 84 nt, synthetic construct
  source 1..84: mol_type = other RNA
tcccccgactctggctttcccccaggtatacatgttcctggtgaaatggcaggacctgtcggagaaggtggtctaccggaggtt

SEQ ID NO: 25980 - RNA, 84 nt, synthetic construct
  source 1..84: mol_type = other RNA
tcccccgactctggctttcccccaggtatacatgttcctggtgaaatggcaggacctgtcggagaaggtggtctaccggcgctt

SEQ ID NO: 25981 - RNA, 84 nt, synthetic construct
  source 1..84: mol_type = other RNA
tcccccgactctggctttcccccaggtttacatgttcctggtgaaatggcaggacctgtcggagaaggtggtctaccggagatt

SEQ ID NO: 25982 - RNA, 84 nt, synthetic construct
  source 1..84: mol_type = other RNA
tcccccgactctggctttcccccaggtctacatgttcctggtgaaatggcaggacctgtcggagaaggtggtctaccggcgctt

SEQ ID NO: 25983 - RNA, 84 nt, synthetic construct
  source 1..84: mol_type = other RNA
tcccccgactctggctttcccccaggtgtacatgttcctggtgaaatggcaggacctgtcggagaaggtggtctaccggaggtt

SEQ ID NO: 25984 - RNA, 84 nt, synthetic construct
  source 1..84: mol_type = other RNA
tcccccgactctggctttcccccaggtttacatgttcctggtgaaatggcaggacctgtcggagaaggtggtctaccggaggtt

SEQ ID NO: 25985 - RNA, 84 nt, synthetic construct
  source 1..84: mol_type = other RNA
tcccccgactctggctttcccccaggtttacatgttcctggtgaaatggcaggacctgtcggagaaggtggtctaccggcgctt

SEQ ID NO: 25986 - RNA, 84 nt, synthetic construct
  source 1..84: mol_type = other RNA
tcccccgactctggctttcccccaggtgtacatgttcctggtgaaatggcaggacctgtcggagaaggtggtctaccggagatt

SEQ ID NO: 25987 - RNA, 84 nt, synthetic construct
  source 1..84: mol_type = other RNA
tcccccgactctggctttcccccaggtgtacatgttcctggtgaaatggcaggacctgtcggagaaggtggtctaccggcgctt

SEQ ID NO: 25988 - RNA, 85 nt, synthetic construct
  source 1..85: mol_type = other RNA
gtcccccgactctggctttcccccaggtgtacatgttcctggtgaaatggcaggacctgtcggagaaggtggtctaccggaggtt

SEQ ID NO: 25989 - RNA, 85 nt, synthetic construct
  source 1..85: mol_type = other RNA
gtcccccgactctggctttcccccaggtgtacatgttcctggtgaaatggcaggacctgtcggagaaggtggtctaccggcgctt

SEQ ID NO: 25990 - RNA, 85 nt, synthetic construct
  source 1..85: mol_type = other RNA
gtcccccgactctggctttcccccaggtttacatgttcctggtgaaatggcaggacctgtcggagaaggtggtctaccggagatt

SEQ ID NO: 25991 - RNA, 85 nt, synthetic construct
  source 1..85: mol_type = other RNA
gtcccccgactctggctttcccccaggtttacatgttcctggtgaaatggcaggacctgtcggagaaggtggtctaccggcgctt

SEQ ID NO: 25992 - RNA, 85 nt, synthetic construct
  source 1..85: mol_type = other RNA
gtcccccgactctggctttcccccaggtgtacatgttcctggtgaaatggcaggacctgtcggagaaggtggtctaccggagatt

SEQ ID NO: 25993 - RNA, 85 nt, synthetic construct
  source 1..85: mol_type = other RNA
gtcccccgactctggctttcccccaggtatacatgttcctggtgaaatggcaggacctgtcggagaaggtggtctaccggagatt

SEQ ID NO: 25994 - RNA, 85 nt, synthetic construct
  source 1..85: mol_type = other RNA
gtcccccgactctggctttcccccaggtatacatgttcctggtgaaatggcaggacctgtcggagaaggtggtctaccggcgctt

SEQ ID NO: 25995 - RNA, 85 nt, synthetic construct
  source 1..85: mol_type = other RNA
gtcccccgactctggctttcccccaggtatacatgttcctggtgaaatggcaggacctgtcggagaaggtggtctaccggaggtt

SEQ ID NO: 25996 - RNA, 85 nt, synthetic construct
  source 1..85: mol_type = other RNA
gtcccccgactctggctttcccccaggtctacatgttcctggtgaaatggcaggacctgtcggagaaggtggtctaccggagatt

SEQ ID NO: 25997 - RNA, 85 nt, synthetic construct
  source 1..85: mol_type = other RNA
gtcccccgactctggctttcccccaggtttacatgttcctggtgaaatggcaggacctgtcggagaaggtggtctaccggaggtt

SEQ ID NO: 25998 - RNA, 85 nt, synthetic construct
  source 1..85: mol_type = other RNA
gtcccccgactctggctttcccccaggtctacatgttcctggtgaaatggcaggacctgtcggagaaggtggtctaccggaggtt

SEQ ID NO: 25999 - RNA, 85 nt, synthetic construct
  source 1..85: mol_type = other RNA
gtcccccgactctggctttcccccaggtctacatgttcctggtgaaatggcaggacctgtcggagaaggtggtctaccggcgctt

SEQ ID NO: 26000 - RNA, 86 nt, synthetic construct
  source 1..86: mol_type = other RNA
ggtcccccgactctggctttcccccaggtgtacatgttcctggtgaaatggcaggacctgtcggagaaggtggtctaccggcgctt

SEQ ID NO: 26001 - RNA, 86 nt, synthetic construct
  source 1..86: mol_type = other RNA
ggtcccccgactctggctttcccccaggtatacatgttcctggtgaaatggcaggacctgtcggagaaggtggtctaccggaggtt

SEQ ID NO: 26002 - RNA, 86 nt, synthetic construct
  source 1..86: mol_type = other RNA
ggtcccccgactctggctttcccccaggtgtacatgttcctggtgaaatggcaggacctgtcggagaaggtggtctaccggaggtt

SEQ ID NO: 26003 - RNA, 86 nt, synthetic construct
  source 1..86: mol_type = other RNA
ggtcccccgactctggctttcccccaggtttacatgttcctggtgaaatggcaggacctgtcggagaaggtggtctaccggaggtt

SEQ ID NO: 26004 - RNA, 86 nt, synthetic construct
  source 1..86: mol_type = other RNA
ggtcccccgactctggctttcccccaggtttacatgttcctggtgaaatggcaggacctgtcggagaaggtggtctaccggcgctt

SEQ ID NO: 26005 - RNA, 86 nt, synthetic construct
  source 1..86: mol_type = other RNA
ggtcccccgactctggctttcccccaggtttacatgttcctggtgaaatggcaggacctgtcggagaaggtggtctaccggagatt

SEQ ID NO: 26006 - RNA, 86 nt, synthetic construct
  source 1..86: mol_type = other RNA
ggtcccccgactctggctttcccccaggtgtacatgttcctggtgaaatggcaggacctgtcggagaaggtggtctaccggagatt

SEQ ID NO: 26007 - RNA, 86 nt, synthetic construct
  source 1..86: mol_type = other RNA
ggtcccccgactctggctttcccccaggtctacatgttcctggtgaaatggcaggacctgtcggagaaggtggtctaccggcgctt

SEQ ID NO: 26008 - RNA, 86 nt, synthetic construct
  source 1..86: mol_type = other RNA
ggtcccccgactctggctttcccccaggtatacatgttcctggtgaaatggcaggacctgtcggagaaggtggtctaccggcgctt

SEQ ID NO: 26009 - RNA, 86 nt, synthetic construct
  source 1..86: mol_type = other RNA
ggtcccccgactctggctttcccccaggtctacatgttcctggtgaaatggcaggacctgtcggagaaggtggtctaccggaggtt

SEQ ID NO: 26010 - RNA, 86 nt, synthetic construct
  source 1..86: mol_type = other RNA
ggtcccccgactctggctttcccccaggtatacatgttcctggtgaaatggcaggacctgtcggagaaggtggtctaccggagatt

SEQ ID NO: 26011 - RNA, 86 nt, synthetic construct
  source 1..86: mol_type = other RNA
ggtcccccgactctggctttcccccaggtctacatgttcctggtgaaatggcaggacctgtcggagaaggtggtctaccggagatt

SEQ ID NO: 26012 - RNA, 87 nt, synthetic construct
  source 1..87: mol_type = other RNA
gggtcccccgactctggctttcccccaggtgtacatgttcctggtgaaatggcaggacctgtcggagaaggtggtctaccggcgctt

SEQ ID NO: 26013 - RNA, 87 nt, synthetic construct
  source 1..87: mol_type = other RNA
gggtcccccgactctggctttcccccaggtttacatgttcctggtgaaatggcaggacctgtcggagaaggtggtctaccggcgctt

SEQ ID NO: 26014 - RNA, 87 nt, synthetic construct
  source 1..87: mol_type = other RNA
gggtcccccgactctggctttcccccaggtgtacatgttcctggtgaaatggcaggacctgtcggagaaggtggtctaccggaggtt

SEQ ID NO: 26015 - RNA, 87 nt, synthetic construct
  source 1..87: mol_type = other RNA
gggtcccccgactctggctttcccccaggtctacatgttcctggtgaaatggcaggacctgtcggagaaggtggtctaccggagatt

SEQ ID NO: 26016 - RNA, 87 nt, synthetic construct
  source 1..87: mol_type = other RNA
gggtcccccgactctggctttcccccaggtatacatgttcctggtgaaatggcaggacctgtcggagaaggtggtctaccggagatt

SEQ ID NO: 26017 - RNA, 87 nt, synthetic construct
  source 1..87: mol_type = other RNA
gggtcccccgactctggctttcccccaggtatacatgttcctggtgaaatggcaggacctgtcggagaaggtggtctaccggcgctt

SEQ ID NO: 26018 - RNA, 87 nt, synthetic construct
  source 1..87: mol_type = other RNA
gggtcccccgactctggctttcccccaggtctacatgttcctggtgaaatggcaggacctgtcggagaaggtggtctaccggaggtt

SEQ ID NO: 26019 - RNA, 87 nt, synthetic construct
  source 1..87: mol_type = other RNA
gggtcccccgactctggctttcccccaggtgtacatgttcctggtgaaatggcaggacctgtcggagaaggtggtctaccggagatt

SEQ ID NO: 26020 - RNA, 87 nt, synthetic construct
  source 1..87: mol_type = other RNA
gggtcccccgactctggctttcccccaggtctacatgttcctggtgaaatggcaggacctgtcggagaaggtggtctaccggcgctt

SEQ ID NO: 26021 - RNA, 87 nt, synthetic construct
  source 1..87: mol_type = other RNA
gggtcccccgactctggctttcccccaggtttacatgttcctggtgaaatggcaggacctgtcggagaaggtggtctaccggagatt

SEQ ID NO: 26022 - RNA, 87 nt, synthetic construct
  source 1..87: mol_type = other RNA
gggtcccccgactctggctttcccccaggtttacatgttcctggtgaaatggcaggacctgtcggagaaggtggtctaccggaggtt

SEQ ID NO: 26023 - RNA, 87 nt, synthetic construct
  source 1..87: mol_type = other RNA
gggtcccccgactctggctttcccccaggtatacatgttcctggtgaaatggcaggacctgtcggagaaggtggtctaccggaggtt

SEQ ID NO: 26024 - RNA, 88 nt, synthetic construct
  source 1..88: mol_type = other RNA
ggggtcccccgactctggctttcccccaggtctacatgttcctggtgaaatggcaggacctgtcggagaaggtggtctaccggcgctt

SEQ ID NO: 26025 - RNA, 88 nt, synthetic construct
  source 1..88: mol_type = other RNA
ggggtcccccgactctggctttcccccaggtgtacatgttcctggtgaaatggcaggacctgtcggagaaggtggtctaccggcgctt

SEQ ID NO: 26026 - RNA, 88 nt, synthetic construct
  source 1..88: mol_type = other RNA
ggggtcccccgactctggctttcccccaggtgtacatgttcctggtgaaatggcaggacctgtcggagaaggtggtctaccggagatt

SEQ ID NO: 26027 - RNA, 88 nt, synthetic construct
  source 1..88: mol_type = other RNA
ggggtcccccgactctggctttcccccaggtgtacatgttcctggtgaaatggcaggacctgtcggagaaggtggtctaccggaggtt

SEQ ID NO: 26028 - RNA, 88 nt, synthetic construct
  source 1..88: mol_type = other RNA
ggggtcccccgactctggctttcccccaggtttacatgttcctggtgaaatggcaggacctgtcggagaaggtggtctaccggaggtt

SEQ ID NO: 26029 - RNA, 88 nt, synthetic construct
  source 1..88: mol_type = other RNA
ggggtcccccgactctggctttcccccaggtttacatgttcctggtgaaatggcaggacctgtcggagaaggtggtctaccggcgctt

SEQ ID NO: 26030 - RNA, 88 nt, synthetic construct
  source 1..88: mol_type = other RNA
ggggtcccccgactctggctttcccccaggtctacatgttcctggtgaaatggcaggacctgtcggagaaggtggtctaccggagatt

SEQ ID NO: 26031 - RNA, 88 nt, synthetic construct
  source 1..88: mol_type = other RNA
ggggtcccccgactctggctttcccccaggtctacatgttcctggtgaaatggcaggacctgtcggagaaggtggtctaccggaggtt

SEQ ID NO: 26032 - RNA, 88 nt, synthetic construct
  source 1..88: mol_type = other RNA
ggggtcccccgactctggctttcccccaggtatacatgttcctggtgaaatggcaggacctgtcggagaaggtggtctaccggagatt

SEQ ID NO: 26033 - RNA, 88 nt, synthetic construct
  source 1..88: mol_type = other RNA
ggggtcccccgactctggctttcccccaggtatacatgttcctggtgaaatggcaggacctgtcggagaaggtggtctaccggaggtt

SEQ ID NO: 26034 - RNA, 88 nt, synthetic construct
  source 1..88: mol_type = other RNA
ggggtcccccgactctggctttcccccaggtatacatgttcctggtgaaatggcaggacctgtcggagaaggtggtctaccggcgctt

SEQ ID NO: 26035 - RNA, 88 nt, synthetic construct
  source 1..88: mol_type = other RNA
ggggtcccccgactctggctttcccccaggtttacatgttcctggtgaaatggcaggacctgtcggagaaggtggtctaccggagatt

SEQ ID NO: 26036 - RNA, 89 nt, synthetic construct
  source 1..89: mol_type = other RNA
tggggtcccccgactctggctttcccccaggtgtacatgttcctggtgaaatggcaggacctgtcggagaaggtggtctaccggcgctt

SEQ ID NO: 26037 - RNA, 89 nt, synthetic construct
  source 1..89: mol_type = other RNA
tggggtcccccgactctggctttcccccaggtttacatgttcctggtgaaatggcaggacctgtcggagaaggtggtctaccggaggtt

SEQ ID NO: 26038 - RNA, 89 nt, synthetic construct
  source 1..89: mol_type = other RNA
tggggtcccccgactctggctttcccccaggtttacatgttcctggtgaaatggcaggacctgtcggagaaggtggtctaccggcgctt

SEQ ID NO: 26039 - RNA, 89 nt, synthetic construct
  source 1..89: mol_type = other RNA
tggggtcccccgactctggctttcccccaggtgtacatgttcctggtgaaatggcaggacctgtcggagaaggtggtctaccggaggtt

SEQ ID NO: 26040 - RNA, 89 nt, synthetic construct
  source 1..89: mol_type = other RNA
tggggtcccccgactctggctttcccccaggtttacatgttcctggtgaaatggcaggacctgtcggagaaggtggtctaccggagatt

SEQ ID NO: 26041 - RNA, 89 nt, synthetic construct
  source 1..89: mol_type = other RNA
tggggtcccccgactctggctttcccccaggtgtacatgttcctggtgaaatggcaggacctgtcggagaaggtggtctaccggagatt

SEQ ID NO: 26042 - RNA, 89 nt, synthetic construct
  source 1..89: mol_type = other RNA
tggggtcccccgactctggctttcccccaggtctacatgttcctggtgaaatggcaggacctgtcggagaaggtggtctaccggcgctt

SEQ ID NO: 26043 - RNA, 89 nt, synthetic construct
  source 1..89: mol_type = other RNA
tggggtcccccgactctggctttcccccaggtctacatgttcctggtgaaatggcaggacctgtcggagaaggtggtctaccggaggtt

SEQ ID NO: 26044 - RNA, 89 nt, synthetic construct
  source 1..89: mol_type = other RNA
tggggtcccccgactctggctttcccccaggtctacatgttcctggtgaaatggcaggacctgtcggagaaggtggtctaccggagatt

SEQ ID NO: 26045 - RNA, 89 nt, synthetic construct
  source 1..89: mol_type = other RNA
tggggtcccccgactctggctttcccccaggtatacatgttcctggtgaaatggcaggacctgtcggagaaggtggtctaccggcgctt

SEQ ID NO: 26046 - RNA, 89 nt, synthetic construct
  source 1..89: mol_type = other RNA
tggggtcccccgactctggctttcccccaggtatacatgttcctggtgaaatggcaggacctgtcggagaaggtggtctaccggaggtt

SEQ ID NO: 26047 - RNA, 89 nt, synthetic construct
  source 1..89: mol_type = other RNA
tggggtcccccgactctggctttcccccaggtatacatgttcctggtgaaatggcaggacctgtcggagaaggtggtctaccggagatt

SEQ ID NO: 26048 - RNA, 90 nt, synthetic construct
  source 1..90: mol_type = other RNA
atggggtcccccgactctggctttcccccaggtctacatgttcctggtgaaatggcaggacctgtcggagaaggtggtctaccggagatt

SEQ ID NO: 26049 - RNA, 90 nt, synthetic construct
  source 1..90: mol_type = other RNA
atggggtcccccgactctggctttcccccaggtctacatgttcctggtgaaatggcaggacctgtcggagaaggtggtctaccggaggtt

SEQ ID NO: 26050 - RNA, 90 nt, synthetic construct
  source 1..90: mol_type = other RNA
atggggtcccccgactctggctttcccccaggtctacatgttcctggtgaaatggcaggacctgtcggagaaggtggtctaccggcgctt

SEQ ID NO: 26051 - RNA, 90 nt, synthetic construct
  source 1..90: mol_type = other RNA
atggggtcccccgactctggctttcccccaggtgtacatgttcctggtgaaatggcaggacctgtcggagaaggtggtctaccggagatt

SEQ ID NO: 26052 - RNA, 90 nt, synthetic construct
  source 1..90: mol_type = other RNA
atggggtcccccgactctggctttcccccaggtgtacatgttcctggtgaaatggcaggacctgtcggagaaggtggtctaccggaggtt

SEQ ID NO: 26053 - RNA, 90 nt, synthetic construct
  source 1..90: mol_type = other RNA
atggggtcccccgactctggctttcccccaggtgtacatgttcctggtgaaatggcaggacctgtcggagaaggtggtctaccggcgctt

SEQ ID NO: 26054 - RNA, 90 nt, synthetic construct
  source 1..90: mol_type = other RNA
atggggtcccccgactctggctttcccccaggtttacatgttcctggtgaaatggcaggacctgtcggagaaggtggtctaccggagatt

SEQ ID NO: 26055 - RNA, 90 nt, synthetic construct
  source 1..90: mol_type = other RNA
atggggtcccccgactctggctttcccccaggtttacatgttcctggtgaaatggcaggacctgtcggagaaggtggtctaccggaggtt

SEQ ID NO: 26056 - RNA, 90 nt, synthetic construct
  source 1..90: mol_type = other RNA
atggggtcccccgactctggctttcccccaggtatacatgttcctggtgaaatggcaggacctgtcggagaaggtggtctaccggaggtt

SEQ ID NO: 26057 - RNA, 90 nt, synthetic construct
  source 1..90: mol_type = other RNA
atggggtcccccgactctggctttcccccaggtatacatgttcctggtgaaatggcaggacctgtcggagaaggtggtctaccggcgctt

SEQ ID NO: 26058 - RNA, 90 nt, synthetic construct
  source 1..90: mol_type = other RNA
atggggtcccccgactctggctttcccccaggtttacatgttcctggtgaaatggcaggacctgtcggagaaggtggtctaccggcgctt

SEQ ID NO: 26059 - RNA, 90 nt, synthetic construct
  source 1..90: mol_type = other RNA
atggggtcccccgactctggctttcccccaggtatacatgttcctggtgaaatggcaggacctgtcggagaaggtggtctaccggagatt

SEQ ID NO: 26060 - RNA, 91 nt, synthetic construct
  source 1..91: mol_type = other RNA
aatggggtcccccgactctggctttcccccaggtttacatgttcctggtgaaatggcaggacctgtcggagaaggtggtctaccggaggtt

SEQ ID NO: 26061 - RNA, 91 nt, synthetic construct
  source 1..91: mol_type = other RNA
aatggggtcccccgactctggctttcccccaggtatacatgttcctggtgaaatggcaggacctgtcggagaaggtggtctaccggcgctt

SEQ ID NO: 26062 - RNA, 91 nt, synthetic construct
  source 1..91: mol_type = other RNA
aatggggtcccccgactctggctttcccccaggtttacatgttcctggtgaaatggcaggacctgtcggagaaggtggtctaccggagatt

SEQ ID NO: 26063 - RNA, 91 nt, synthetic construct
  source 1..91: mol_type = other RNA
aatggggtcccccgactctggctttcccccaggtgtacatgttcctggtgaaatggcaggacctgtcggagaaggtggtctaccggcgctt

SEQ ID NO: 26064 - RNA, 91 nt, synthetic construct
  source 1..91: mol_type = other RNA
aatggggtcccccgactctggctttcccccaggtctacatgttcctggtgaaatggcaggacctgtcggagaaggtggtctaccggagatt

SEQ ID NO: 26065 - RNA, 91 nt, synthetic construct
  source 1..91: mol_type = other RNA
aatggggtcccccgactctggctttcccccaggtgtacatgttcctggtgaaatggcaggacctgtcggagaaggtggtctaccggaggtt

SEQ ID NO: 26066 - RNA, 91 nt, synthetic construct
  source 1..91: mol_type = other RNA
aatggggtcccccgactctggctttcccccaggtgtacatgttcctggtgaaatggcaggacctgtcggagaaggtggtctaccggagatt

SEQ ID NO: 26067 - RNA, 91 nt, synthetic construct
  source 1..91: mol_type = other RNA
aatggggtcccccgactctggctttcccccaggtctacatgttcctggtgaaatggcaggacctgtcggagaaggtggtctaccggaggtt

SEQ ID NO: 26068 - RNA, 91 nt, synthetic construct
  source 1..91: mol_type = other RNA
aatggggtcccccgactctggctttcccccaggtatacatgttcctggtgaaatggcaggacctgtcggagaaggtggtctaccggaggtt

SEQ ID NO: 26069 - RNA, 91 nt, synthetic construct
  source 1..91: mol_type = other RNA
aatggggtcccccgactctggctttcccccaggtatacatgttcctggtgaaatggcaggacctgtcggagaaggtggtctaccggagatt

SEQ ID NO: 26070 - RNA, 91 nt, synthetic construct
  source 1..91: mol_type = other RNA
aatggggtcccccgactctggctttcccccaggtttacatgttcctggtgaaatggcaggacctgtcggagaaggtggtctaccggcgctt

SEQ ID NO: 26071 - RNA, 91 nt, synthetic construct
  source 1..91: mol_type = other RNA
aatggggtcccccgactctggctttcccccaggtctacatgttcctggtgaaatggcaggacctgtcggagaaggtggtctaccggcgctt

SEQ ID NO: 26072 - RNA, 92 nt, synthetic construct
  source 1..92: mol_type = other RNA
gaatggggtcccccgactctggctttcccccaggtttacatgttcctggtgaaatggcaggacctgtcggagaaggtggtctaccggagatt

SEQ ID NO: 26073 - RNA, 92 nt, synthetic construct
  source 1..92: mol_type = other RNA
gaatggggtcccccgactctggctttcccccaggtatacatgttcctggtgaaatggcaggacctgtcggagaaggtggtctaccggcgctt

SEQ ID NO: 26074 - RNA, 92 nt, synthetic construct
  source 1..92: mol_type = other RNA
gaatggggtcccccgactctggctttcccccaggtatacatgttcctggtgaaatggcaggacctgtcggagaaggtggtctaccggaggtt

SEQ ID NO: 26075 - RNA, 92 nt, synthetic construct
  source 1..92: mol_type = other RNA
gaatggggtcccccgactctggctttcccccaggtatacatgttcctggtgaaatggcaggacctgtcggagaaggtggtctaccggagatt

SEQ ID NO: 26076 - RNA, 92 nt, synthetic construct
  source 1..92: mol_type = other RNA
gaatggggtcccccgactctggctttcccccaggtgtacatgttcctggtgaaatggcaggacctgtcggagaaggtggtctaccggaggtt

SEQ ID NO: 26077 - RNA, 92 nt, synthetic construct
  source 1..92: mol_type = other RNA
gaatggggtcccccgactctggctttcccccaggtctacatgttcctggtgaaatggcaggacctgtcggagaaggtggtctaccggcgctt

SEQ ID NO: 26078 - RNA, 92 nt, synthetic construct
  source 1..92: mol_type = other RNA
gaatggggtcccccgactctggctttcccccaggtgtacatgttcctggtgaaatggcaggacctgtcggagaaggtggtctaccggcgctt

SEQ ID NO: 26079 - RNA, 92 nt, synthetic construct
  source 1..92: mol_type = other RNA
gaatggggtcccccgactctggctttcccccaggtttacatgttcctggtgaaatggcaggacctgtcggagaaggtggtctaccggaggtt

SEQ ID NO: 26080 - RNA, 92 nt, synthetic construct
  source 1..92: mol_type = other RNA
gaatggggtcccccgactctggctttcccccaggtttacatgttcctggtgaaatggcaggacctgtcggagaaggtggtctaccggcgctt

SEQ ID NO: 26081 - RNA, 92 nt, synthetic construct
  source 1..92: mol_type = other RNA
gaatggggtcccccgactctggctttcccccaggtctacatgttcctggtgaaatggcaggacctgtcggagaaggtggtctaccggaggtt

SEQ ID NO: 26082 - RNA, 92 nt, synthetic construct
  source 1..92: mol_type = other RNA
gaatggggtcccccgactctggctttcccccaggtctacatgttcctggtgaaatggcaggacctgtcggagaaggtggtctaccggagatt

SEQ ID NO: 26083 - RNA, 92 nt, synthetic construct
  source 1..92: mol_type = other RNA
gaatggggtcccccgactctggctttcccccaggtgtacatgttcctggtgaaatggcaggacctgtcggagaaggtggtctaccggagatt

SEQ ID NO: 26084 - RNA, 93 nt, synthetic construct
  source 1..93: mol_type = other RNA
tgaatggggtcccccgactctggctttcccccaggtttacatgttcctggtgaaatggcaggacctgtcggagaaggtggtctaccggaggtt

SEQ ID NO: 26085 - RNA, 93 nt, synthetic construct
  source 1..93: mol_type = other RNA
tgaatggggtcccccgactctggctttcccccaggtctacatgttcctggtgaaatggcaggacctgtcggagaaggtggtctaccggaggtt

SEQ ID NO: 26086 - RNA, 93 nt, synthetic construct
  source 1..93: mol_type = other RNA
tgaatggggtcccccgactctggctttcccccaggtctacatgttcctggtgaaatggcaggacctgtcggagaaggtggtctaccggagatt

SEQ ID NO: 26087 - RNA, 93 nt, synthetic construct
  source 1..93: mol_type = other RNA
tgaatggggtcccccgactctggctttcccccaggtatacatgttcctggtgaaatggcaggacctgtcggagaaggtggtctaccggcgctt

SEQ ID NO: 26088 - RNA, 93 nt, synthetic construct
  source 1..93: mol_type = other RNA
tgaatggggtcccccgactctggctttcccccaggtatacatgttcctggtgaaatggcaggacctgtcggagaaggtggtctaccggaggtt

SEQ ID NO: 26089 - RNA, 93 nt, synthetic construct
  source 1..93: mol_type = other RNA
tgaatggggtcccccgactctggctttcccccaggtctacatgttcctggtgaaatggcaggacctgtcggagaaggtggtctaccggcgctt

SEQ ID NO: 26090 - RNA, 93 nt, synthetic construct
  source 1..93: mol_type = other RNA
tgaatggggtcccccgactctggctttcccccaggtgtacatgttcctggtgaaatggcaggacctgtcggagaaggtggtctaccggagatt

SEQ ID NO: 26091 - RNA, 93 nt, synthetic construct
  source 1..93: mol_type = other RNA
tgaatggggtcccccgactctggctttcccccaggtatacatgttcctggtgaaatggcaggacctgtcggagaaggtggtctaccggagatt

SEQ ID NO: 26092 - RNA, 93 nt, synthetic construct
  source 1..93: mol_type = other RNA
tgaatggggtcccccgactctggctttcccccaggtttacatgttcctggtgaaatggcaggacctgtcggagaaggtggtctaccggcgctt

SEQ ID NO: 26093 - RNA, 93 nt, synthetic construct
  source 1..93: mol_type = other RNA
tgaatggggtcccccgactctggctttcccccaggtgtacatgttcctggtgaaatggcaggacctgtcggagaaggtggtctaccggaggtt

SEQ ID NO: 26094 - RNA, 93 nt, synthetic construct
  source 1..93: mol_type = other RNA
tgaatggggtcccccgactctggctttcccccaggtgtacatgttcctggtgaaatggcaggacctgtcggagaaggtggtctaccggcgctt

SEQ ID NO: 26095 - RNA, 93 nt, synthetic construct
  source 1..93: mol_type = other RNA
tgaatggggtcccccgactctggctttcccccaggtttacatgttcctggtgaaatggcaggacctgtcggagaaggtggtctaccggagatt

SEQ ID NO: 26096 - RNA, 94 nt, synthetic construct
  source 1..94: mol_type = other RNA
ctgaatggggtcccccgactctggctttcccccaggtatacatgttcctggtgaaatggcaggacctgtcggagaaggtggtctaccggagatt

SEQ ID NO: 26097 - RNA, 94 nt, synthetic construct
  source 1..94: mol_type = other RNA
ctgaatggggtcccccgactctggctttcccccaggtatacatgttcctggtgaaatggcaggacctgtcggagaaggtggtctaccggaggtt

SEQ ID NO: 26098 - RNA, 94 nt, synthetic construct
  source 1..94: mol_type = other RNA
ctgaatggggtcccccgactctggctttcccccaggtatacatgttcctggtgaaatggcaggacctgtcggagaaggtggtctaccggcgctt

SEQ ID NO: 26099 - RNA, 94 nt, synthetic construct
  source 1..94: mol_type = other RNA
ctgaatggggtcccccgactctggctttcccccaggtctacatgttcctggtgaaatggcaggacctgtcggagaaggtggtctaccggagatt

SEQ ID NO: 26100 - RNA, 94 nt, synthetic construct
  source 1..94: mol_type = other RNA
ctgaatggggtcccccgactctggctttcccccaggtctacatgttcctggtgaaatggcaggacctgtcggagaaggtggtctaccggaggtt

SEQ ID NO: 26101 - RNA, 94 nt, synthetic construct
  source 1..94: mol_type = other RNA
ctgaatggggtcccccgactctggctttcccccaggtgtacatgttcctggtgaaatggcaggacctgtcggagaaggtggtctaccggagatt

SEQ ID NO: 26102 - RNA, 94 nt, synthetic construct
  source 1..94: mol_type = other RNA
ctgaatggggtcccccgactctggctttcccccaggtgtacatgttcctggtgaaatggcaggacctgtcggagaaggtggtctaccggaggtt

SEQ ID NO: 26103 - RNA, 94 nt, synthetic construct
  source 1..94: mol_type = other RNA
ctgaatggggtcccccgactctggctttcccccaggtgtacatgttcctggtgaaatggcaggacctgtcggagaaggtggtctaccggcgctt

SEQ ID NO: 26104 - RNA, 94 nt, synthetic construct
  source 1..94: mol_type = other RNA
ctgaatggggtcccccgactctggctttcccccaggtttacatgttcctggtgaaatggcaggacctgtcggagaaggtggtctaccggcgctt

SEQ ID NO: 26105 - RNA, 94 nt, synthetic construct
  source 1..94: mol_type = other RNA
ctgaatggggtcccccgactctggctttcccccaggtctacatgttcctggtgaaatggcaggacctgtcggagaaggtggtctaccggcgctt

SEQ ID NO: 26106 - RNA, 94 nt, synthetic construct
  source 1..94: mol_type = other RNA
ctgaatggggtcccccgactctggctttcccccaggtttacatgttcctggtgaaatggcaggacctgtcggagaaggtggtctaccggaggtt

SEQ ID NO: 26107 - RNA, 94 nt, synthetic construct
  source 1..94: mol_type = other RNA
ctgaatggggtcccccgactctggctttcccccaggtttacatgttcctggtgaaatggcaggacctgtcggagaaggtggtctaccggagatt

SEQ ID NO: 26108 - RNA, 95 nt, synthetic construct
  source 1..95: mol_type = other RNA
gctgaatggggtcccccgactctggctttcccccaggtgtacatgttcctggtgaaatggcaggacctgtcggagaaggtggtctaccggaggtt

SEQ ID NO: 26109 - RNA, 95 nt, synthetic construct
  source 1..95: mol_type = other RNA
gctgaatggggtcccccgactctggctttcccccaggtatacatgttcctggtgaaatggcaggacctgtcggagaaggtggtctaccggaggtt

SEQ ID NO: 26110 - RNA, 95 nt, synthetic construct
  source 1..95: mol_type = other RNA
gctgaatggggtcccccgactctggctttcccccaggtttacatgttcctggtgaaatggcaggacctgtcggagaaggtggtctaccggcgctt

SEQ ID NO: 26111 - RNA, 95 nt, synthetic construct
  source 1..95: mol_type = other RNA
gctgaatggggtcccccgactctggctttcccccaggtttacatgttcctggtgaaatggcaggacctgtcggagaaggtggtctaccggaggtt

SEQ ID NO: 26112 - RNA, 95 nt, synthetic construct
  source 1..95: mol_type = other RNA
gctgaatggggtcccccgactctggctttcccccaggtttacatgttcctggtgaaatggcaggacctgtcggagaaggtggtctaccggagatt

SEQ ID NO: 26113 - RNA, 95 nt, synthetic construct
  source 1..95: mol_type = other RNA
gctgaatggggtcccccgactctggctttcccccaggtgtacatgttcctggtgaaatggcaggacctgtcggagaaggtggtctaccggagatt

SEQ ID NO: 26114 - RNA, 95 nt, synthetic construct
  source 1..95: mol_type = other RNA
gctgaatggggtcccccgactctggctttcccccaggtctacatgttcctggtgaaatggcaggacctgtcggagaaggtggtctaccggcgctt

SEQ ID NO: 26115 - RNA, 95 nt, synthetic construct
  source 1..95: mol_type = other RNA
gctgaatggggtcccccgactctggctttcccccaggtctacatgttcctggtgaaatggcaggacctgtcggagaaggtggtctaccggaggtt

SEQ ID NO: 26116 - RNA, 95 nt, synthetic construct
  source 1..95: mol_type = other RNA
gctgaatggggtcccccgactctggctttcccccaggtatacatgttcctggtgaaatggcaggacctgtcggagaaggtggtctaccggcgctt

SEQ ID NO: 26117 - RNA, 95 nt, synthetic construct
  source 1..95: mol_type = other RNA
gctgaatggggtcccccgactctggctttcccccaggtctacatgttcctggtgaaatggcaggacctgtcggagaaggtggtctaccggagatt

SEQ ID NO: 26118 - RNA, 95 nt, synthetic construct
  source 1..95: mol_type = other RNA
gctgaatggggtcccccgactctggctttcccccaggtatacatgttcctggtgaaatggcaggacctgtcggagaaggtggtctaccggagatt

SEQ ID NO: 26119 - RNA, 95 nt, synthetic construct
  source 1..95: mol_type = other RNA
gctgaatggggtcccccgactctggctttcccccaggtgtacatgttcctggtgaaatggcaggacctgtcggagaaggtggtctaccggcgctt

SEQ ID NO: 26120 - RNA, 96 nt, synthetic construct
  source 1..96: mol_type = other RNA
ggctgaatggggtcccccgactctggctttcccccaggtatacatgttcctggtgaaatggcaggacctgtcggagaaggtggtctaccggcgctt

SEQ ID NO: 26121 - RNA, 96 nt, synthetic construct
  source 1..96: mol_type = other RNA
ggctgaatggggtcccccgactctggctttcccccaggtatacatgttcctggtgaaatggcaggacctgtcggagaaggtggtctaccggaggtt

SEQ ID NO: 26122 - RNA, 96 nt, synthetic construct
  source 1..96: mol_type = other RNA
ggctgaatggggtcccccgactctggctttcccccaggtatacatgttcctggtgaaatggcaggacctgtcggagaaggtggtctaccggagatt

SEQ ID NO: 26123 - RNA, 96 nt, synthetic construct
  source 1..96: mol_type = other RNA
ggctgaatggggtcccccgactctggctttcccccaggtttacatgttcctggtgaaatggcaggacctgtcggagaaggtggtctaccggagatt

SEQ ID NO: 26124 - RNA, 96 nt, synthetic construct
  source 1..96: mol_type = other RNA
ggctgaatggggtcccccgactctggctttcccccaggtctacatgttcctggtgaaatggcaggacctgtcggagaaggtggtctaccggagatt

SEQ ID NO: 26125 - RNA, 96 nt, synthetic construct
  source 1..96: mol_type = other RNA
ggctgaatggggtcccccgactctggctttcccccaggtgtacatgttcctggtgaaatggcaggacctgtcggagaaggtggtctaccggcgctt

SEQ ID NO: 26126 - RNA, 96 nt, synthetic construct
  source 1..96: mol_type = other RNA
ggctgaatggggtcccccgactctggctttcccccaggtgtacatgttcctggtgaaatggcaggacctgtcggagaaggtggtctaccggaggtt

SEQ ID NO: 26127 - RNA, 96 nt, synthetic construct
  source 1..96: mol_type = other RNA
ggctgaatggggtcccccgactctggctttcccccaggtctacatgttcctggtgaaatggcaggacctgtcggagaaggtggtctaccggaggtt

SEQ ID NO: 26128 - RNA, 96 nt, synthetic construct
  source 1..96: mol_type = other RNA
ggctgaatggggtcccccgactctggctttcccccaggtctacatgttcctggtgaaatggcaggacctgtcggagaaggtggtctaccggcgctt

SEQ ID NO: 26129 - RNA, 96 nt, synthetic construct
  source 1..96: mol_type = other RNA
ggctgaatggggtcccccgactctggctttcccccaggtttacatgttcctggtgaaatggcaggacctgtcggagaaggtggtctaccggaggtt

SEQ ID NO: 26130 - RNA, 96 nt, synthetic construct
  source 1..96: mol_type = other RNA
ggctgaatggggtcccccgactctggctttcccccaggtttacatgttcctggtgaaatggcaggacctgtcggagaaggtggtctaccggcgctt

SEQ ID NO: 26131 - RNA, 96 nt, synthetic construct
  source 1..96: mol_type = other RNA
ggctgaatggggtcccccgactctggctttcccccaggtgtacatgttcctggtgaaatggcaggacctgtcggagaaggtggtctaccggagatt

SEQ ID NO: 26132 - RNA, 97 nt, synthetic construct
  source 1..97: mol_type = other RNA
aggctgaatggggtcccccgactctggctttcccccaggtctacatgttcctggtgaaatggcaggacctgtcggagaaggtggtctaccggagatt

SEQ ID NO: 26133 - RNA, 97 nt, synthetic construct
  source 1..97: mol_type = other RNA
aggctgaatggggtcccccgactctggctttcccccaggtctacatgttcctggtgaaatggcaggacctgtcggagaaggtggtctaccggaggtt

SEQ ID NO: 26134 - RNA, 97 nt, synthetic construct
  source 1..97: mol_type = other RNA
aggctgaatggggtcccccgactctggctttcccccaggtctacatgttcctggtgaaatggcaggacctgtcggagaaggtggtctaccggcgctt

SEQ ID NO: 26135 - RNA, 97 nt, synthetic construct
  source 1..97: mol_type = other RNA
aggctgaatggggtcccccgactctggctttcccccaggtatacatgttcctggtgaaatggcaggacctgtcggagaaggtggtctaccggaggtt

SEQ ID NO: 26136 - RNA, 97 nt, synthetic construct
  source 1..97: mol_type = other RNA
aggctgaatggggtcccccgactctggctttcccccaggtgtacatgttcctggtgaaatggcaggacctgtcggagaaggtggtctaccggcgctt

SEQ ID NO: 26137 - RNA, 97 nt, synthetic construct
  source 1..97: mol_type = other RNA
aggctgaatggggtcccccgactctggctttcccccaggtgtacatgttcctggtgaaatggcaggacctgtcggagaaggtggtctaccggagatt

SEQ ID NO: 26138 - RNA, 97 nt, synthetic construct
  source 1..97: mol_type = other RNA
aggctgaatggggtcccccgactctggctttcccccaggtatacatgttcctggtgaaatggcaggacctgtcggagaaggtggtctaccggcgctt

SEQ ID NO: 26139 - RNA, 97 nt, synthetic construct
  source 1..97: mol_type = other RNA
aggctgaatggggtcccccgactctggctttcccccaggtatacatgttcctggtgaaatggcaggacctgtcggagaaggtggtctaccggagatt

SEQ ID NO: 26140 - RNA, 97 nt, synthetic construct
  source 1..97: mol_type = other RNA
aggctgaatggggtcccccgactctggctttcccccaggtttacatgttcctggtgaaatggcaggacctgtcggagaaggtggtctaccggcgctt

SEQ ID NO: 26141 - RNA, 97 nt, synthetic construct
  source 1..97: mol_type = other RNA
aggctgaatggggtcccccgactctggctttcccccaggtttacatgttcctggtgaaatggcaggacctgtcggagaaggtggtctaccggaggtt

SEQ ID NO: 26142 - RNA, 97 nt, synthetic construct
  source 1..97: mol_type = other RNA
aggctgaatggggtcccccgactctggctttcccccaggtttacatgttcctggtgaaatggcaggacctgtcggagaaggtggtctaccggagatt

SEQ ID NO: 26143 - RNA, 97 nt, synthetic construct
  source 1..97: mol_type = other RNA
aggctgaatggggtcccccgactctggctttcccccaggtgtacatgttcctggtgaaatggcaggacctgtcggagaaggtggtctaccggaggtt

SEQ ID NO: 26144 - RNA, 98 nt, synthetic construct
  source 1..98: mol_type = other RNA
gaggctgaatggggtcccccgactctggctttcccccaggtatacatgttcctggtgaaatggcaggacctgtcggagaaggtggtctaccggaggtt

SEQ ID NO: 26145 - RNA, 98 nt, synthetic construct
  source 1..98: mol_type = other RNA
gaggctgaatggggtcccccgactctggctttcccccaggtatacatgttcctggtgaaatggcaggacctgtcggagaaggtggtctaccggagatt

SEQ ID NO: 26146 - RNA, 98 nt, synthetic construct
  source 1..98: mol_type = other RNA
gaggctgaatggggtcccccgactctggctttcccccaggtgtacatgttcctggtgaaatggcaggacctgtcggagaaggtggtctaccggaggtt

SEQ ID NO: 26147 - RNA, 98 nt, synthetic construct
  source 1..98: mol_type = other RNA
gaggctgaatggggtcccccgactctggctttcccccaggtatacatgttcctggtgaaatggcaggacctgtcggagaaggtggtctaccggcgctt

SEQ ID NO: 26148 - RNA, 98 nt, synthetic construct
  source 1..98: mol_type = other RNA
gaggctgaatggggtcccccgactctggctttcccccaggtctacatgttcctggtgaaatggcaggacctgtcggagaaggtggtctaccggagatt

SEQ ID NO: 26149 - RNA, 98 nt, synthetic construct
  source 1..98: mol_type = other RNA
gaggctgaatggggtcccccgactctggctttcccccaggtctacatgttcctggtgaaatggcaggacctgtcggagaaggtggtctaccggaggtt

SEQ ID NO: 26150 - RNA, 98 nt, synthetic construct
  source 1..98: mol_type = other RNA
gaggctgaatggggtcccccgactctggctttcccccaggtttacatgttcctggtgaaatggcaggacctgtcggagaaggtggtctaccggagatt

SEQ ID NO: 26151 - RNA, 98 nt, synthetic construct
  source 1..98: mol_type = other RNA
gaggctgaatggggtcccccgactctggctttcccccaggtgtacatgttcctggtgaaatggcaggacctgtcggagaaggtggtctaccggagatt

SEQ ID NO: 26152 - RNA, 98 nt, synthetic construct
  source 1..98: mol_type = other RNA
gaggctgaatggggtcccccgactctggctttcccccaggtgtacatgttcctggtgaaatggcaggacctgtcggagaaggtggtctaccggcgctt

SEQ ID NO: 26153 - RNA, 98 nt, synthetic construct
  source 1..98: mol_type = other RNA
gaggctgaatggggtcccccgactctggctttcccccaggtttacatgttcctggtgaaatggcaggacctgtcggagaaggtggtctaccggaggtt

SEQ ID NO: 26154 - RNA, 98 nt, synthetic construct
  source 1..98: mol_type = other RNA
gaggctgaatggggtcccccgactctggctttcccccaggtttacatgttcctggtgaaatggcaggacctgtcggagaaggtggtctaccggcgctt

SEQ ID NO: 26155 - RNA, 98 nt, synthetic construct
  source 1..98: mol_type = other RNA
gaggctgaatggggtcccccgactctggctttcccccaggtctacatgttcctggtgaaatggcaggacctgtcggagaaggtggtctaccggcgctt

SEQ ID NO: 26156 - RNA, 99 nt, synthetic construct
  source 1..99: mol_type = other RNA
ggaggctgaatggggtcccccgactctggctttcccccaggtgtacatgttcctggtgaaatggcaggacctgtcggagaaggtggtctaccggcgctt

SEQ ID NO: 26157 - RNA, 99 nt, synthetic construct
  source 1..99: mol_type = other RNA
ggaggctgaatggggtcccccgactctggctttcccccaggtttacatgttcctggtgaaatggcaggacctgtcggagaaggtggtctaccggagatt

SEQ ID NO: 26158 - RNA, 99 nt, synthetic construct
  source 1..99: mol_type = other RNA
ggaggctgaatggggtcccccgactctggctttcccccaggtttacatgttcctggtgaaatggcaggacctgtcggagaaggtggtctaccggaggtt

SEQ ID NO: 26159 - RNA, 99 nt, synthetic construct
  source 1..99: mol_type = other RNA
ggaggctgaatggggtcccccgactctggctttcccccaggtttacatgttcctggtgaaatggcaggacctgtcggagaaggtggtctaccggcgctt

SEQ ID NO: 26160 - RNA, 99 nt, synthetic construct
  source 1..99: mol_type = other RNA
ggaggctgaatggggtcccccgactctggctttcccccaggtgtacatgttcctggtgaaatggcaggacctgtcggagaaggtggtctaccggaggtt

SEQ ID NO: 26161 - RNA, 99 nt, synthetic construct
  source 1..99: mol_type = other RNA
ggaggctgaatggggtcccccgactctggctttcccccaggtatacatgttcctggtgaaatggcaggacctgtcggagaaggtggtctaccggcgctt

SEQ ID NO: 26162 - RNA, 99 nt, synthetic construct
  source 1..99: mol_type = other RNA
ggaggctgaatggggtcccccgactctggctttcccccaggtgtacatgttcctggtgaaatggcaggacctgtcggagaaggtggtctaccggagatt

SEQ ID NO: 26163 - RNA, 99 nt, synthetic construct
  source 1..99: mol_type = other RNA
ggaggctgaatggggtcccccgactctggctttcccccaggtctacatgttcctggtgaaatggcaggacctgtcggagaaggtggtctaccggcgctt

SEQ ID NO: 26164 - RNA, 99 nt, synthetic construct
  source 1..99: mol_type = other RNA
ggaggctgaatggggtcccccgactctggctttcccccaggtatacatgttcctggtgaaatggcaggacctgtcggagaaggtggtctaccggaggtt

SEQ ID NO: 26165 - RNA, 99 nt, synthetic construct
  source 1..99: mol_type = other RNA
ggaggctgaatggggtcccccgactctggctttcccccaggtctacatgttcctggtgaaatggcaggacctgtcggagaaggtggtctaccggagatt

SEQ ID NO: 26166 - RNA, 99 nt, synthetic construct
  source 1..99: mol_type = other RNA
ggaggctgaatggggtcccccgactctggctttcccccaggtctacatgttcctggtgaaatggcaggacctgtcggagaaggtggtctaccggaggtt

SEQ ID NO: 26167 - RNA, 99 nt, synthetic construct
  source 1..99: mol_type = other RNA
ggaggctgaatggggtcccccgactctggctttcccccaggtatacatgttcctggtgaaatggcaggacctgtcggagaaggtggtctaccggagatt

SEQ ID NO: 26168 - RNA, 100 nt, synthetic construct
  source 1..100: mol_type = other RNA
tggaggctgaatggggtcccccgactctggctttcccccaggtatacatgttcctggtgaaatggcaggacctgtcggagaaggtggtctaccggcgctt

SEQ ID NO: 26169 - RNA, 100 nt, synthetic construct
  source 1..100: mol_type = other RNA
tggaggctgaatggggtcccccgactctggctttcccccaggtctacatgttcctggtgaaatggcaggacctgtcggagaaggtggtctaccggaggtt

SEQ ID NO: 26170 - RNA, 100 nt, synthetic construct
  source 1..100: mol_type = other RNA
tggaggctgaatggggtcccccgactctggctttcccccaggtatacatgttcctggtgaaatggcaggacctgtcggagaaggtggtctaccggaggtt

SEQ ID NO: 26171 - RNA, 100 nt, synthetic construct
  source 1..100: mol_type = other RNA
tggaggctgaatggggtcccccgactctggctttcccccaggtctacatgttcctggtgaaatggcaggacctgtcggagaaggtggtctaccggagatt

SEQ ID NO: 26172 - RNA, 100 nt, synthetic construct
  source 1..100: mol_type = other RNA
tggaggctgaatggggtcccccgactctggctttcccccaggtctacatgttcctggtgaaatggcaggacctgtcggagaaggtggtctaccggcgctt

SEQ ID NO: 26173 - RNA, 100 nt, synthetic construct
  source 1..100: mol_type = other RNA
tggaggctgaatggggtcccccgactctggctttcccccaggtgtacatgttcctggtgaaatggcaggacctgtcggagaaggtggtctaccggagatt

SEQ ID NO: 26174 - RNA, 100 nt, synthetic construct
  source 1..100: mol_type = other RNA
tggaggctgaatggggtcccccgactctggctttcccccaggtttacatgttcctggtgaaatggcaggacctgtcggagaaggtggtctaccggcgctt

SEQ ID NO: 26175 - RNA, 100 nt, synthetic construct
  source 1..100: mol_type = other RNA
tggaggctgaatggggtcccccgactctggctttcccccaggtttacatgttcctggtgaaatggcaggacctgtcggagaaggtggtctaccggagatt

SEQ ID NO: 26176 - RNA, 100 nt, synthetic construct
  source 1..100: mol_type = other RNA
tggaggctgaatggggtcccccgactctggctttcccccaggtatacatgttcctggtgaaatggcaggacctgtcggagaaggtggtctaccggagatt

SEQ ID NO: 26177 - RNA, 100 nt, synthetic construct
  source 1..100: mol_type = other RNA
tggaggctgaatggggtcccccgactctggctttcccccaggtgtacatgttcctggtgaaatggcaggacctgtcggagaaggtggtctaccggcgctt

SEQ ID NO: 26178 - RNA, 100 nt, synthetic construct
  source 1..100: mol_type = other RNA
tggaggctgaatggggtcccccgactctggctttcccccaggtttacatgttcctggtgaaatggcaggacctgtcggagaaggtggtctaccggaggtt

SEQ ID NO: 26179 - RNA, 100 nt, synthetic construct
  source 1..100: mol_type = other RNA
tggaggctgaatggggtcccccgactctggctttcccccaggtgtacatgttcctggtgaaatggcaggacctgtcggagaaggtggtctaccggaggtt

SEQ ID NO: 26180 - RNA, 101 nt, synthetic construct
  source 1..101: mol_type = other RNA
ttggaggctgaatggggtcccccgactctggctttcccccaggtttacatgttcctggtgaaatggcaggacctgtcggagaaggtggtctaccggaggtt

SEQ ID NO: 26181 - RNA, 101 nt, synthetic construct
  source 1..101: mol_type = other RNA
ttggaggctgaatggggtcccccgactctggctttcccccaggtctacatgttcctggtgaaatggcaggacctgtcggagaaggtggtctaccggcgctt

SEQ ID NO: 26182 - RNA, 101 nt, synthetic construct
  source 1..101: mol_type = other RNA
ttggaggctgaatggggtcccccgactctggctttcccccaggtctacatgttcctggtgaaatggcaggacctgtcggagaaggtggtctaccggaggtt

SEQ ID NO: 26183 - RNA, 101 nt, synthetic construct
  source 1..101: mol_type = other RNA
ttggaggctgaatggggtcccccgactctggctttcccccaggtctacatgttcctggtgaaatggcaggacctgtcggagaaggtggtctaccggagatt

SEQ ID NO: 26184 - RNA, 101 nt, synthetic construct
  source 1..101: mol_type = other RNA
ttggaggctgaatggggtcccccgactctggctttcccccaggtgtacatgttcctggtgaaatggcaggacctgtcggagaaggtggtctaccggaggtt

SEQ ID NO: 26185 - RNA, 101 nt, synthetic construct
  source 1..101: mol_type = other RNA
ttggaggctgaatggggtcccccgactctggctttcccccaggtgtacatgttcctggtgaaatggcaggacctgtcggagaaggtggtctaccggcgctt

SEQ ID NO: 26186 - RNA, 101 nt, synthetic construct
  source 1..101: mol_type = other RNA
ttggaggctgaatggggtcccccgactctggctttcccccaggtgtacatgttcctggtgaaatggcaggacctgtcggagaaggtggtctaccggagatt

SEQ ID NO: 26187 - RNA, 101 nt, synthetic construct
  source 1..101: mol_type = other RNA
ttggaggctgaatggggtcccccgactctggctttcccccaggtatacatgttcctggtgaaatggcaggacctgtcggagaaggtggtctaccggcgctt

SEQ ID NO: 26188 - RNA, 101 nt, synthetic construct
  source 1..101: mol_type = other RNA
ttggaggctgaatggggtcccccgactctggctttcccccaggtatacatgttcctggtgaaatggcaggacctgtcggagaaggtggtctaccggagatt

SEQ ID NO: 26189 - RNA, 101 nt, synthetic construct
  source 1..101: mol_type = other RNA
ttggaggctgaatggggtcccccgactctggctttcccccaggtttacatgttcctggtgaaatggcaggacctgtcggagaaggtggtctaccggcgctt

SEQ ID NO: 26190 - RNA, 101 nt, synthetic construct
  source 1..101: mol_type = other RNA
ttggaggctgaatggggtcccccgactctggctttcccccaggtatacatgttcctggtgaaatggcaggacctgtcggagaaggtggtctaccggaggtt

SEQ ID NO: 26191 - RNA, 101 nt, synthetic construct
  source 1..101: mol_type = other RNA
ttggaggctgaatggggtcccccgactctggctttcccccaggtttacatgttcctggtgaaatggcaggacctgtcggagaaggtggtctaccggagatt

SEQ ID NO: 26192 - RNA, 102 nt, synthetic construct
  source 1..102: mol_type = other RNA
tttggaggctgaatggggtcccccgactctggctttcccccaggtttacatgttcctggtgaaatggcaggacctgtcggagaaggtggtctaccggcgctt

SEQ ID NO: 26193 - RNA, 102 nt, synthetic construct
  source 1..102: mol_type = other RNA
tttggaggctgaatggggtcccccgactctggctttcccccaggtgtacatgttcctggtgaaatggcaggacctgtcggagaaggtggtctaccggaggtt

SEQ ID NO: 26194 - RNA, 102 nt, synthetic construct
  source 1..102: mol_type = other RNA
tttggaggctgaatggggtcccccgactctggctttcccccaggtatacatgttcctggtgaaatggcaggacctgtcggagaaggtggtctaccggaggtt

SEQ ID NO: 26195 - RNA, 102 nt, synthetic construct
  source 1..102: mol_type = other RNA
tttggaggctgaatggggtcccccgactctggctttcccccaggtgtacatgttcctggtgaaatggcaggacctgtcggagaaggtggtctaccggagatt

SEQ ID NO: 26196 - RNA, 102 nt, synthetic construct
  source 1..102: mol_type = other RNA
tttggaggctgaatggggtcccccgactctggctttcccccaggtctacatgttcctggtgaaatggcaggacctgtcggagaaggtggtctaccggagatt

SEQ ID NO: 26197 - RNA, 102 nt, synthetic construct
  source 1..102: mol_type = other RNA
tttggaggctgaatggggtcccccgactctggctttcccccaggtttacatgttcctggtgaaatggcaggacctgtcggagaaggtggtctaccggagatt

SEQ ID NO: 26198 - RNA, 102 nt, synthetic construct
  source 1..102: mol_type = other RNA
tttggaggctgaatggggtcccccgactctggctttcccccaggtttacatgttcctggtgaaatggcaggacctgtcggagaaggtggtctaccggaggtt

SEQ ID NO: 26199 - RNA, 102 nt, synthetic construct
  source 1..102: mol_type = other RNA
tttggaggctgaatggggtcccccgactctggctttcccccaggtatacatgttcctggtgaaatggcaggacctgtcggagaaggtggtctaccggcgctt

SEQ ID NO: 26200 - RNA, 102 nt, synthetic construct
  source 1..102: mol_type = other RNA
tttggaggctgaatggggtcccccgactctggctttcccccaggtctacatgttcctggtgaaatggcaggacctgtcggagaaggtggtctaccggcgctt

SEQ ID NO: 26201 - RNA, 102 nt, synthetic construct
  source 1..102: mol_type = other RNA
tttggaggctgaatggggtcccccgactctggctttcccccaggtgtacatgttcctggtgaaatggcaggacctgtcggagaaggtggtctaccggcgctt

SEQ ID NO: 26202 - RNA, 102 nt, synthetic construct
  source 1..102: mol_type = other RNA
tttggaggctgaatggggtcccccgactctggctttcccccaggtatacatgttcctggtgaaatggcaggacctgtcggagaaggtggtctaccggagatt

SEQ ID NO: 26203 - RNA, 102 nt, synthetic construct
  source 1..102: mol_type = other RNA
tttggaggctgaatggggtcccccgactctggctttcccccaggtctacatgttcctggtgaaatggcaggacctgtcggagaaggtggtctaccggaggtt

SEQ ID NO: 26204 - RNA, 103 nt, synthetic construct
  source 1..103: mol_type = other RNA
ctttggaggctgaatggggtcccccgactctggctttcccccaggtttacatgttcctggtgaaatggcaggacctgtcggagaaggtggtctaccggaggtt

SEQ ID NO: 26205 - RNA, 103 nt, synthetic construct
  source 1..103: mol_type = other RNA
ctttggaggctgaatggggtcccccgactctggctttcccccaggtatacatgttcctggtgaaatggcaggacctgtcggagaaggtggtctaccggagatt

SEQ ID NO: 26206 - RNA, 103 nt, synthetic construct
  source 1..103: mol_type = other RNA
ctttggaggctgaatggggtcccccgactctggctttcccccaggtatacatgttcctggtgaaatggcaggacctgtcggagaaggtggtctaccggaggtt

SEQ ID NO: 26207 - RNA, 103 nt, synthetic construct
  source 1..103: mol_type = other RNA
ctttggaggctgaatggggtcccccgactctggctttcccccaggtctacatgttcctggtgaaatggcaggacctgtcggagaaggtggtctaccggagatt

SEQ ID NO: 26208 - RNA, 103 nt, synthetic construct
  source 1..103: mol_type = other RNA
ctttggaggctgaatggggtcccccgactctggctttcccccaggtctacatgttcctggtgaaatggcaggacctgtcggagaaggtggtctaccggcgctt

SEQ ID NO: 26209 - RNA, 103 nt, synthetic construct
  source 1..103: mol_type = other RNA
ctttggaggctgaatggggtcccccgactctggctttcccccaggtgtacatgttcctggtgaaatggcaggacctgtcggagaaggtggtctaccggagatt

SEQ ID NO: 26210 - RNA, 103 nt, synthetic construct
  source 1..103: mol_type = other RNA
ctttggaggctgaatggggtcccccgactctggctttcccccaggtgtacatgttcctggtgaaatggcaggacctgtcggagaaggtggtctaccggaggtt

SEQ ID NO: 26211 - RNA, 103 nt, synthetic construct
  source 1..103: mol_type = other RNA
ctttggaggctgaatggggtcccccgactctggctttcccccaggtgtacatgttcctggtgaaatggcaggacctgtcggagaaggtggtctaccggcgctt

SEQ ID NO: 26212 - RNA, 103 nt, synthetic construct
  source 1..103: mol_type = other RNA
ctttggaggctgaatggggtcccccgactctggctttcccccaggtttacatgttcctggtgaaatggcaggacctgtcggagaaggtggtctaccggagatt

SEQ ID NO: 26213 - RNA, 103 nt, synthetic construct
  source 1..103: mol_type = other RNA
ctttggaggctgaatggggtcccccgactctggctttcccccaggtctacatgttcctggtgaaatggcaggacctgtcggagaaggtggtctaccggaggtt

SEQ ID NO: 26214 - RNA, 103 nt, synthetic construct
  source 1..103: mol_type = other RNA
ctttggaggctgaatggggtcccccgactctggctttcccccaggtttacatgttcctggtgaaatggcaggacctgtcggagaaggtggtctaccggcgctt

SEQ ID NO: 26215 - RNA, 103 nt, synthetic construct
  source 1..103: mol_type = other RNA
ctttggaggctgaatggggtcccccgactctggctttcccccaggtatacatgttcctggtgaaatggcaggacctgtcggagaaggtggtctaccggcgctt

SEQ ID NO: 26216 - RNA, 20 nt, synthetic construct
  source 1..20: mol_type = other RNA
gtggtctaccggaggttcac

SEQ ID NO: 26217 - RNA, 20 nt, synthetic construct
  source 1..20: mol_type = other RNA
gtggtctaccggagattcac

SEQ ID NO: 26218 - RNA, 16 nt, synthetic construct
  source 1..16: mol_type = other RNA
catttcaccaggaaca

SEQ ID NO: 26219 - RNA, 17 nt, synthetic construct
  source 1..17: mol_type = other RNA
ccatttcaccaggaaca

SEQ ID NO: 26220 - RNA, 18 nt, synthetic construct
  source 1..18: mol_type = other RNA
gccatttcaccaggaaca

SEQ ID NO: 26221 - RNA, 19 nt, synthetic construct
  source 1..19: mol_type = other RNA
tgccatttcaccaggaaca

SEQ ID NO: 26222 - RNA, 20 nt, synthetic construct
  source 1..20: mol_type = other RNA
ctgccatttcaccaggaaca

SEQ ID NO: 26223 - RNA, 21 nt, synthetic construct
  source 1..21: mol_type = other RNA
cctgccatttcaccaggaaca

SEQ ID NO: 26224 - RNA, 22 nt, synthetic construct
  source 1..22: mol_type = other RNA
tcctgccatttcaccaggaaca

SEQ ID NO: 26225-26230 - skipped (6 entries)

SEQ ID NO: 26231 - RNA, 10 nt, synthetic construct
  source 1..10: mol_type = other RNA
tcctggtgaa

SEQ ID NO: 26232 - RNA, 11 nt, synthetic construct
  source 1..11: mol_type = other RNA
tcctggtgaaa

SEQ ID NO: 26233 - RNA, 12 nt, synthetic construct
  source 1..12: mol_type = other RNA
tcctggtgaaat

SEQ ID NO: 26234 - RNA, 13 nt, synthetic construct
  source 1..13: mol_type = other RNA
tcctggtgaaatg

SEQ ID NO: 26235 - RNA, 14 nt, synthetic construct
  source 1..14: mol_type = other RNA
tcctggtgaaatgg

SEQ ID NO: 26236 - RNA, 15 nt, synthetic construct
  source 1..15: mol_type = other RNA
tcctggtgaaatggc

SEQ ID NO: 26237 - RNA, 16 nt, synthetic construct
  source 1..16: mol_type = other RNA
tcctggtgaaatggca

SEQ ID NO: 26238 - RNA, 17 nt, synthetic construct
  source 1..17: mol_type = other RNA
tcctggtgaaatggcag

SEQ ID NO: 26239 - RNA, 18 nt, synthetic construct
  source 1..18: mol_type = other RNA
tcctggtgaaatggcagg

SEQ ID NO: 26240 - RNA, 19 nt, synthetic construct
  source 1..19: mol_type = other RNA
tcctggtgaaatggcagga

SEQ ID NO: 26241 - RNA, 10 nt, synthetic construct
  source 1..10: mol_type = other RNA
gtgtacatgt

SEQ ID NO: 26242 - RNA, 10 nt, synthetic construct
  source 1..10: mol_type = other RNA
gtatatatgt

SEQ ID NO: 26243 - RNA, 10 nt, synthetic construct
  source 1..10: mol_type = other RNA
gtatacatgt

SEQ ID NO: 26244 - RNA, 10 nt, synthetic construct
  source 1..10: mol_type = other RNA
gtttatatgt

SEQ ID NO: 26245 - RNA, 10 nt, synthetic construct
  source 1..10: mol_type = other RNA
gtttacatgt

SEQ ID NO: 26246 - RNA, 10 nt, synthetic construct
  source 1..10: mol_type = other RNA
gtctacatgt

SEQ ID NO: 26247 - RNA, 10 nt, synthetic construct
  source 1..10: mol_type = other RNA
gtctatatgt

SEQ ID NO: 26248 - RNA, 10 nt, synthetic construct
  source 1..10: mol_type = other RNA
gtgtatatgt

SEQ ID NO: 26249 - RNA, 11 nt, synthetic construct
  source 1..11: mol_type = other RNA
ggtctacatgt

SEQ ID NO: 26250 - RNA, 11 nt, synthetic construct
  source 1..11: mol_type = other RNA
ggtgtatatgt

SEQ ID NO: 26251 - RNA, 11 nt, synthetic construct
  source 1..11: mol_type = other RNA
ggtatatatgt

SEQ ID NO: 26252 - RNA, 11 nt, synthetic construct
  source 1..11: mol_type = other RNA
ggtgtacatgt

SEQ ID NO: 26253 - RNA, 11 nt, synthetic construct
  source 1..11: mol_type = other RNA
ggtttatatgt

SEQ ID NO: 26254 - RNA, 11 nt, synthetic construct
  source 1..11: mol_type = other RNA
ggtttacatgt

SEQ ID NO: 26255 - RNA, 11 nt, synthetic construct
  source 1..11: mol_type = other RNA
ggtctatatgt

SEQ ID NO: 26256 - RNA, 11 nt, synthetic construct
  source 1..11: mol_type = other RNA
ggtatacatgt

SEQ ID NO: 26257 - RNA, 12 nt, synthetic construct
  source 1..12: mol_type = other RNA
aggtatatatgt

SEQ ID NO: 26258 - RNA, 12 nt, synthetic construct
  source 1..12: mol_type = other RNA
aggtatacatgt

SEQ ID NO: 26259 - RNA, 12 nt, synthetic construct
  source 1..12: mol_type = other RNA
aggtctacatgt

SEQ ID NO: 26260 - RNA, 12 nt, synthetic construct
  source 1..12: mol_type = other RNA
aggtttatatgt

SEQ ID NO: 26261 - RNA, 12 nt, synthetic construct
  source 1..12: mol_type = other RNA
aggtgtatatgt

SEQ ID NO: 26262 - RNA, 12 nt, synthetic construct
  source 1..12: mol_type = other RNA
aggtttacatgt

SEQ ID NO: 26263 - RNA, 12 nt, synthetic construct
  source 1..12: mol_type = other RNA
aggtgtacatgt

SEQ ID NO: 26264 - RNA, 12 nt, synthetic construct
  source 1..12: mol_type = other RNA
aggtctatatgt

SEQ ID NO: 26265 - RNA, 13 nt, synthetic construct
  source 1..13: mol_type = other RNA
caggtttacatgt

SEQ ID NO: 26266 - RNA, 13 nt, synthetic construct
  source 1..13: mol_type = other RNA
caggtatatatgt

SEQ ID NO: 26267 - RNA, 13 nt, synthetic construct
  source 1..13: mol_type = other RNA
caggtctacatgt

SEQ ID NO: 26268 - RNA, 13 nt, synthetic construct
  source 1..13: mol_type = other RNA
caggtgtatatgt

SEQ ID NO: 26269 - RNA, 13 nt, synthetic construct
  source 1..13: mol_type = other RNA
caggtctatatgt

SEQ ID NO: 26270 - RNA, 13 nt, synthetic construct
  source 1..13: mol_type = other RNA
caggtgtacatgt

SEQ ID NO: 26271 - RNA, 13 nt, synthetic construct
  source 1..13: mol_type = other RNA
caggtttatatgt

SEQ ID NO: 26272 - RNA, 13 nt, synthetic construct
  source 1..13: mol_type = other RNA
caggtatacatgt

SEQ ID NO: 26273 - RNA, 14 nt, synthetic construct
  source 1..14: mol_type = other RNA
ccaggtctatatgt

SEQ ID NO: 26274 - RNA, 14 nt, synthetic construct
  source 1..14: mol_type = other RNA
ccaggtatacatgt

SEQ ID NO: 26275 - RNA, 14 nt, synthetic construct
  source 1..14: mol_type = other RNA
ccaggtgtacatgt

SEQ ID NO: 26276 - RNA, 14 nt, synthetic construct
  source 1..14: mol_type = other RNA
ccaggtatatatgt

SEQ ID NO: 26277 - RNA, 14 nt, synthetic construct
  source 1..14: mol_type = other RNA
ccaggtttatatgt

SEQ ID NO: 26278 - RNA, 14 nt, synthetic construct
  source 1..14: mol_type = other RNA
ccaggtttacatgt

SEQ ID NO: 26279 - RNA, 14 nt, synthetic construct
  source 1..14: mol_type = other RNA
ccaggtgtatatgt

SEQ ID NO: 26280 - RNA, 14 nt, synthetic construct
  source 1..14: mol_type = other RNA
ccaggtctacatgt

SEQ ID NO: 26281 - RNA, 15 nt, synthetic construct
  source 1..15: mol_type = other RNA
cccaggtatacatgt

SEQ ID NO: 26282 - RNA, 15 nt, synthetic construct
  source 1..15: mol_type = other RNA
cccaggtctacatgt

SEQ ID NO: 26283 - RNA, 15 nt, synthetic construct
  source 1..15: mol_type = other RNA
cccaggtatatatgt

SEQ ID NO: 26284 - RNA, 15 nt, synthetic construct
  source 1..15: mol_type = other RNA
cccaggtttatatgt

SEQ ID NO: 26285 - RNA, 15 nt, synthetic construct
  source 1..15: mol_type = other RNA
cccaggtgtatatgt

SEQ ID NO: 26286 - RNA, 15 nt, synthetic construct
  source 1..15: mol_type = other RNA
cccaggtttacatgt

SEQ ID NO: 26287 - RNA, 15 nt, synthetic construct
  source 1..15: mol_type = other RNA
cccaggtctatatgt

SEQ ID NO: 26288 - RNA, 15 nt, synthetic construct
  source 1..15: mol_type = other RNA
cccaggtgtacatgt

SEQ ID NO: 26289 - RNA, 16 nt, synthetic construct
  source 1..16: mol_type = other RNA
ccccaggtttacatgt

SEQ ID NO: 26290 - RNA, 16 nt, synthetic construct
  source 1..16: mol_type = other RNA
ccccaggtgtatatgt

SEQ ID NO: 26291 - RNA, 16 nt, synthetic construct
  source 1..16: mol_type = other RNA
ccccaggtttatatgt

SEQ ID NO: 26292 - RNA, 16 nt, synthetic construct
  source 1..16: mol_type = other RNA
ccccaggtgtacatgt

SEQ ID NO: 26293 - RNA, 16 nt, synthetic construct
  source 1..16: mol_type = other RNA
ccccaggtctatatgt

SEQ ID NO: 26294 - RNA, 16 nt, synthetic construct
  source 1..16: mol_type = other RNA
ccccaggtctacatgt

SEQ ID NO: 26295 - RNA, 16 nt, synthetic construct
  source 1..16: mol_type = other RNA
ccccaggtatatatgt

SEQ ID NO: 26296 - RNA, 16 nt, synthetic construct
  source 1..16: mol_type = other RNA
ccccaggtatacatgt

SEQ ID NO: 26297 - RNA, 17 nt, synthetic construct
  source 1..17: mol_type = other RNA
cccccaggtttatatgt

SEQ ID NO: 26298 - RNA, 17 nt, synthetic construct
  source 1..17: mol_type = other RNA
cccccaggtatacatgt

SEQ ID NO: 26299 - RNA, 17 nt, synthetic construct
  source 1..17: mol_type = other RNA
cccccaggtctacatgt

SEQ ID NO: 26300 - RNA, 17 nt, synthetic construct
  source 1..17: mol_type = other RNA
cccccaggtctatatgt

SEQ ID NO: 26301 - RNA, 17 nt, synthetic construct
  source 1..17: mol_type = other RNA
cccccaggtgtacatgt

SEQ ID NO: 26302 - RNA, 17 nt, synthetic construct
  source 1..17: mol_type = other RNA
cccccaggtgtatatgt

SEQ ID NO: 26303 - RNA, 17 nt, synthetic construct
  source 1..17: mol_type = other RNA
cccccaggtttacatgt

SEQ ID NO: 26304 - RNA, 17 nt, synthetic construct
  source 1..17: mol_type = other RNA
cccccaggtatatatgt

SEQ ID NO: 26305 - RNA, 18 nt, synthetic construct
  source 1..18: mol_type = other RNA
tcccccaggtatatatgt

SEQ ID NO: 26306 - RNA, 18 nt, synthetic construct
  source 1..18: mol_type = other RNA
tcccccaggtgtacatgt

SEQ ID NO: 26307 - RNA, 18 nt, synthetic construct
  source 1..18: mol_type = other RNA
tcccccaggtttacatgt

SEQ ID NO: 26308 - RNA, 18 nt, synthetic construct
  source 1..18: mol_type = other RNA
tcccccaggtgtatatgt

SEQ ID NO: 26309 - RNA, 18 nt, synthetic construct
  source 1..18: mol_type = other RNA
tcccccaggtttatatgt

SEQ ID NO: 26310 - RNA, 18 nt, synthetic construct
  source 1..18: mol_type = other RNA
tcccccaggtctacatgt

SEQ ID NO: 26311 - RNA, 18 nt, synthetic construct
  source 1..18: mol_type = other RNA
tcccccaggtctatatgt

SEQ ID NO: 26312 - RNA, 18 nt, synthetic construct
  source 1..18: mol_type = other RNA
tcccccaggtatacatgt

SEQ ID NO: 26313 - RNA, 19 nt, synthetic construct
  source 1..19: mol_type = other RNA
ttcccccaggtttatatgt

SEQ ID NO: 26314 - RNA, 19 nt, synthetic construct
  source 1..19: mol_type = other RNA
ttcccccaggtttacatgt

SEQ ID NO: 26315 - RNA, 19 nt, synthetic construct
  source 1..19: mol_type = other RNA
ttcccccaggtgtatatgt

SEQ ID NO: 26316 - RNA, 19 nt, synthetic construct
  source 1..19: mol_type = other RNA
ttcccccaggtgtacatgt

SEQ ID NO: 26317 - RNA, 19 nt, synthetic construct
  source 1..19: mol_type = other RNA
ttcccccaggtctatatgt

SEQ ID NO: 26318 - RNA, 19 nt, synthetic construct
  source 1..19: mol_type = other RNA
ttcccccaggtatatatgt

SEQ ID NO: 26319 - RNA, 19 nt, synthetic construct
  source 1..19: mol_type = other RNA
ttcccccaggtatacatgt

SEQ ID NO: 26320 - RNA, 19 nt, synthetic construct
  source 1..19: mol_type = other RNA
ttcccccaggtctacatgt

SEQ ID NO: 26321 - RNA, 20 nt, synthetic construct
  source 1..20: mol_type = other RNA
tttcccccaggtctacatgt

SEQ ID NO: 26322 - RNA, 20 nt, synthetic construct
  source 1..20: mol_type = other RNA
tttcccccaggtgtacatgt

SEQ ID NO: 26323 - RNA, 20 nt, synthetic construct
  source 1..20: mol_type = other RNA
tttcccccaggtctatatgt

SEQ ID NO: 26324 - RNA, 20 nt, synthetic construct
  source 1..20: mol_type = other RNA
tttcccccaggtgtatatgt

SEQ ID NO: 26325 - RNA, 20 nt, synthetic construct
  source 1..20: mol_type = other RNA
tttcccccaggtttatatgt

SEQ ID NO: 26326 - RNA, 20 nt, synthetic construct
  source 1..20: mol_type = other RNA
tttcccccaggtttacatgt

SEQ ID NO: 26327 - RNA, 20 nt, synthetic construct
  source 1..20: mol_type = other RNA
tttcccccaggtatacatgt

SEQ ID NO: 26328 - RNA, 20 nt, synthetic construct
  source 1..20: mol_type = other RNA
tttcccccaggtatatatgt

SEQ ID NO: 26329 - RNA, 21 nt, synthetic construct
  source 1..21: mol_type = other RNA
ctttcccccaggtttacatgt

SEQ ID NO: 26330 - RNA, 21 nt, synthetic construct
  source 1..21: mol_type = other RNA
ctttcccccaggtgtatatgt

SEQ ID NO: 26331 - RNA, 21 nt, synthetic construct
  source 1..21: mol_type = other RNA
ctttcccccaggtatatatgt

SEQ ID NO: 26332 - RNA, 21 nt, synthetic construct
  source 1..21: mol_type = other RNA
ctttcccccaggtctatatgt

SEQ ID NO: 26333 - RNA, 21 nt, synthetic construct
  source 1..21: mol_type = other RNA
ctttcccccaggtctacatgt

SEQ ID NO: 26334 - RNA, 21 nt, synthetic construct
  source 1..21: mol_type = other RNA
ctttcccccaggtatacatgt

SEQ ID NO: 26335 - RNA, 21 nt, synthetic construct
  source 1..21: mol_type = other RNA
ctttcccccaggtgtacatgt

SEQ ID NO: 26336 - RNA, 21 nt, synthetic construct
  source 1..21: mol_type = other RNA
ctttcccccaggtttatatgt

SEQ ID NO: 26337 - RNA, 22 nt, synthetic construct
  source 1..22: mol_type = other RNA
gctttcccccaggtttatatgt

SEQ ID NO: 26338 - RNA, 22 nt, synthetic construct
  source 1..22: mol_type = other RNA
gctttcccccaggtgtatatgt

SEQ ID NO: 26339 - RNA, 22 nt, synthetic construct
  source 1..22: mol_type = other RNA
gctttcccccaggtctatatgt

SEQ ID NO: 26340 - RNA, 22 nt, synthetic construct
  source 1..22: mol_type = other RNA
gctttcccccaggtatacatgt

SEQ ID NO: 26341 - RNA, 22 nt, synthetic construct
  source 1..22: mol_type = other RNA
gctttcccccaggtttacatgt

SEQ ID NO: 26342 - RNA, 22 nt, synthetic construct
  source 1..22: mol_type = other RNA
gctttcccccaggtgtacatgt

SEQ ID NO: 26343 - RNA, 22 nt, synthetic construct
  source 1..22: mol_type = other RNA
gctttcccccaggtatatatgt

SEQ ID NO: 26344 - RNA, 22 nt, synthetic construct
  source 1..22: mol_type = other RNA
gctttcccccaggtctacatgt

SEQ ID NO: 26345 - RNA, 23 nt, synthetic construct
  source 1..23: mol_type = other RNA
ggctttcccccaggtgtatatgt

SEQ ID NO: 26346 - RNA, 23 nt, synthetic construct
  source 1..23: mol_type = other RNA
ggctttcccccaggtatacatgt

SEQ ID NO: 26347 - RNA, 23 nt, synthetic construct
  source 1..23: mol_type = other RNA
ggctttcccccaggtatatatgt

SEQ ID NO: 26348 - RNA, 23 nt, synthetic construct
  source 1..23: mol_type = other RNA
ggctttcccccaggtgtacatgt

SEQ ID NO: 26349 - RNA, 23 nt, synthetic construct
  source 1..23: mol_type = other RNA
ggctttcccccaggtctatatgt

SEQ ID NO: 26350 - RNA, 23 nt, synthetic construct
  source 1..23: mol_type = other RNA
ggctttcccccaggtttatatgt

SEQ ID NO: 26351 - RNA, 23 nt, synthetic construct
  source 1..23: mol_type = other RNA
ggctttcccccaggtttacatgt

SEQ ID NO: 26352 - RNA, 23 nt, synthetic construct
  source 1..23: mol_type = other RNA
ggctttcccccaggtctacatgt

SEQ ID NO: 26353 - RNA, 24 nt, synthetic construct
  source 1..24: mol_type = other RNA
tggctttcccccaggtctacatgt

SEQ ID NO: 26354 - RNA, 24 nt, synthetic construct
  source 1..24: mol_type = other RNA
tggctttcccccaggtttacatgt

SEQ ID NO: 26355 - RNA, 24 nt, synthetic construct
  source 1..24: mol_type = other RNA
tggctttcccccaggtgtatatgt

SEQ ID NO: 26356 - RNA, 24 nt, synthetic construct
  source 1..24: mol_type = other RNA
tggctttcccccaggtctatatgt

SEQ ID NO: 26357 - RNA, 24 nt, synthetic construct
  source 1..24: mol_type = other RNA
tggctttcccccaggtttatatgt

SEQ ID NO: 26358 - RNA, 24 nt, synthetic construct
  source 1..24: mol_type = other RNA
tggctttcccccaggtatatatgt

SEQ ID NO: 26359 - RNA, 24 nt, synthetic construct
  source 1..24: mol_type = other RNA
tggctttcccccaggtatacatgt

SEQ ID NO: 26360 - RNA, 24 nt, synthetic construct
  source 1..24: mol_type = other RNA
tggctttcccccaggtgtacatgt

SEQ ID NO: 26361 - RNA, 25 nt, synthetic construct
  source 1..25: mol_type = other RNA
ctggctttcccccaggtatacatgt

SEQ ID NO: 26362 - RNA, 25 nt, synthetic construct
  source 1..25: mol_type = other RNA
ctggctttcccccaggtgtatatgt

SEQ ID NO: 26363 - RNA, 25 nt, synthetic construct
  source 1..25: mol_type = other RNA
ctggctttcccccaggtatatatgt

SEQ ID NO: 26364 - RNA, 25 nt, synthetic construct
  source 1..25: mol_type = other RNA
ctggctttcccccaggtctatatgt

SEQ ID NO: 26365 - RNA, 25 nt, synthetic construct
  source 1..25: mol_type = other RNA
ctggctttcccccaggtttacatgt

SEQ ID NO: 26366 - RNA, 25 nt, synthetic construct
  source 1..25: mol_type = other RNA
ctggctttcccccaggtttatatgt

SEQ ID NO: 26367 - RNA, 25 nt, synthetic construct
  source 1..25: mol_type = other RNA
ctggctttcccccaggtctacatgt

SEQ ID NO: 26368 - RNA, 25 nt, synthetic construct
  source 1..25: mol_type = other RNA
ctggctttcccccaggtgtacatgt

SEQ ID NO: 26369 - RNA, 26 nt, synthetic construct
  source 1..26: mol_type = other RNA
tctggctttcccccaggtttacatgt

SEQ ID NO: 26370 - RNA, 26 nt, synthetic construct
  source 1..26: mol_type = other RNA
tctggctttcccccaggtgtatatgt

SEQ ID NO: 26371 - RNA, 26 nt, synthetic construct
  source 1..26: mol_type = other RNA
tctggctttcccccaggtgtacatgt

SEQ ID NO: 26372 - RNA, 26 nt, synthetic construct
  source 1..26: mol_type = other RNA
tctggctttcccccaggtctacatgt

SEQ ID NO: 26373 - RNA, 26 nt, synthetic construct
  source 1..26: mol_type = other RNA
tctggctttcccccaggtatatatgt

SEQ ID NO: 26374 - RNA, 26 nt, synthetic construct
  source 1..26: mol_type = other RNA
tctggctttcccccaggtctatatgt

SEQ ID NO: 26375 - RNA, 26 nt, synthetic construct
  source 1..26: mol_type = other RNA
tctggctttcccccaggtttatatgt

SEQ ID NO: 26376 - RNA, 26 nt, synthetic construct
  source 1..26: mol_type = other RNA
tctggctttcccccaggtatacatgt

SEQ ID NO: 26377 - RNA, 27 nt, synthetic construct
  source 1..27: mol_type = other RNA
ctctggctttcccccaggtgtatatgt

SEQ ID NO: 26378 - RNA, 27 nt, synthetic construct
  source 1..27: mol_type = other RNA
ctctggctttcccccaggtttatatgt

SEQ ID NO: 26379 - RNA, 27 nt, synthetic construct
  source 1..27: mol_type = other RNA
ctctggctttcccccaggtttacatgt

SEQ ID NO: 26380 - RNA, 27 nt, synthetic construct
  source 1..27: mol_type = other RNA
ctctggctttcccccaggtctatatgt

SEQ ID NO: 26381 - RNA, 27 nt, synthetic construct
  source 1..27: mol_type = other RNA
ctctggctttcccccaggtgtacatgt

SEQ ID NO: 26382 - RNA, 27 nt, synthetic construct
  source 1..27: mol_type = other RNA
ctctggctttcccccaggtatatatgt

SEQ ID NO: 26383 - RNA, 27 nt, synthetic construct
  source 1..27: mol_type = other RNA
ctctggctttcccccaggtctacatgt

SEQ ID NO: 26384 - RNA, 27 nt, synthetic construct
  source 1..27: mol_type = other RNA
ctctggctttcccccaggtatacatgt

SEQ ID NO: 26385 - RNA, 28 nt, synthetic construct
  source 1..28: mol_type = other RNA
actctggctttcccccaggtgtacatgt

SEQ ID NO: 26386 - RNA, 28 nt, synthetic construct
  source 1..28: mol_type = other RNA
actctggctttcccccaggtatacatgt

SEQ ID NO: 26387 - RNA, 28 nt, synthetic construct
  source 1..28: mol_type = other RNA
actctggctttcccccaggtttatatgt

SEQ ID NO: 26388 - RNA, 28 nt, synthetic construct
  source 1..28: mol_type = other RNA
actctggctttcccccaggtttacatgt

SEQ ID NO: 26389 - RNA, 28 nt, synthetic construct
  source 1..28: mol_type = other RNA
actctggctttcccccaggtgtatatgt

SEQ ID NO: 26390 - RNA, 28 nt, synthetic construct
  source 1..28: mol_type = other RNA
actctggctttcccccaggtctatatgt

SEQ ID NO: 26391 - RNA, 28 nt, synthetic construct
  source 1..28: mol_type = other RNA
actctggctttcccccaggtctacatgt

SEQ ID NO: 26392 - RNA, 28 nt, synthetic construct
  source 1..28: mol_type = other RNA
actctggctttcccccaggtatatatgt

SEQ ID NO: 26393 - RNA, 29 nt, synthetic construct
  source 1..29: mol_type = other RNA
gactctggctttcccccaggtatacatgt

SEQ ID NO: 26394 - RNA, 29 nt, synthetic construct
  source 1..29: mol_type = other RNA
gactctggctttcccccaggtctatatgt

SEQ ID NO: 26395 - RNA, 29 nt, synthetic construct
  source 1..29: mol_type = other RNA
gactctggctttcccccaggtgtacatgt

SEQ ID NO: 26396 - RNA, 29 nt, synthetic construct
  source 1..29: mol_type = other RNA
gactctggctttcccccaggtatatatgt

SEQ ID NO: 26397 - RNA, 29 nt, synthetic construct
  source 1..29: mol_type = other RNA
gactctggctttcccccaggtttacatgt

SEQ ID NO: 26398 - RNA, 29 nt, synthetic construct
  source 1..29: mol_type = other RNA
gactctggctttcccccaggtctacatgt

SEQ ID NO: 26399 - RNA, 29 nt, synthetic construct
  source 1..29: mol_type = other RNA
gactctggctttcccccaggtttatatgt

SEQ ID NO: 26400 - RNA, 29 nt, synthetic construct
  source 1..29: mol_type = other RNA
gactctggctttcccccaggtgtatatgt

SEQ ID NO: 26401 - RNA, 30 nt, synthetic construct
  source 1..30: mol_type = other RNA
cgactctggctttcccccaggtttacatgt

SEQ ID NO: 26402 - RNA, 30 nt, synthetic construct
  source 1..30: mol_type = other RNA
cgactctggctttcccccaggtatatatgt

SEQ ID NO: 26403 - RNA, 30 nt, synthetic construct
  source 1..30: mol_type = other RNA
cgactctggctttcccccaggtatacatgt

SEQ ID NO: 26404 - RNA, 30 nt, synthetic construct
  source 1..30: mol_type = other RNA
cgactctggctttcccccaggtgtacatgt

SEQ ID NO: 26405 - RNA, 30 nt, synthetic construct
  source 1..30: mol_type = other RNA
cgactctggctttcccccaggtctacatgt

SEQ ID NO: 26406 - RNA, 30 nt, synthetic construct
  source 1..30: mol_type = other RNA
cgactctggctttcccccaggtgtatatgt

SEQ ID NO: 26407 - RNA, 30 nt, synthetic construct
  source 1..30: mol_type = other RNA
cgactctggctttcccccaggtctatatgt

SEQ ID NO: 26408 - RNA, 30 nt, synthetic construct
  source 1..30: mol_type = other RNA
cgactctggctttcccccaggtttatatgt

SEQ ID NO: 26409 - RNA, 31 nt, synthetic construct
  source 1..31: mol_type = other RNA
ccgactctggctttcccccaggtgtatatgt

SEQ ID NO: 26410 - RNA, 31 nt, synthetic construct
  source 1..31: mol_type = other RNA
ccgactctggctttcccccaggtatatatgt

SEQ ID NO: 26411 - RNA, 31 nt, synthetic construct
  source 1..31: mol_type = other RNA
ccgactctggctttcccccaggtctacatgt

SEQ ID NO: 26412 - RNA, 31 nt, synthetic construct
  source 1..31: mol_type = other RNA
ccgactctggctttcccccaggtctatatgt

SEQ ID NO: 26413 - RNA, 31 nt, synthetic construct
  source 1..31: mol_type = other RNA
ccgactctggctttcccccaggtgtacatgt

SEQ ID NO: 26414 - RNA, 31 nt, synthetic construct
  source 1..31: mol_type = other RNA
ccgactctggctttcccccaggtttacatgt

SEQ ID NO: 26415 - RNA, 31 nt, synthetic construct
  source 1..31: mol_type = other RNA
ccgactctggctttcccccaggtttatatgt

SEQ ID NO: 26416 - RNA, 31 nt, synthetic construct
  source 1..31: mol_type = other RNA
ccgactctggctttcccccaggtatacatgt

SEQ ID NO: 26417 - RNA, 32 nt, synthetic construct
  source 1..32: mol_type = other RNA
cccgactctggctttcccccaggtgtatatgt

SEQ ID NO: 26418 - RNA, 32 nt, synthetic construct
  source 1..32: mol_type = other RNA
cccgactctggctttcccccaggtttatatgt

SEQ ID NO: 26419 - RNA, 32 nt, synthetic construct
  source 1..32: mol_type = other RNA
cccgactctggctttcccccaggtttacatgt

SEQ ID NO: 26420 - RNA, 32 nt, synthetic construct
  source 1..32: mol_type = other RNA
cccgactctggctttcccccaggtgtacatgt

SEQ ID NO: 26421 - RNA, 32 nt, synthetic construct
  source 1..32: mol_type = other RNA
cccgactctggctttcccccaggtatacatgt

SEQ ID NO: 26422 - RNA, 32 nt, synthetic construct
  source 1..32: mol_type = other RNA
cccgactctggctttcccccaggtctacatgt

SEQ ID NO: 26423 - RNA, 32 nt, synthetic construct
  source 1..32: mol_type = other RNA
cccgactctggctttcccccaggtatatatgt

SEQ ID NO: 26424 - RNA, 32 nt, synthetic construct
  source 1..32: mol_type = other RNA
cccgactctggctttcccccaggtctatatgt

SEQ ID NO: 26425 - RNA, 33 nt, synthetic construct
  source 1..33: mol_type = other RNA
ccccgactctggctttcccccaggtgtatatgt

SEQ ID NO: 26426 - RNA, 33 nt, synthetic construct
  source 1..33: mol_type = other RNA
ccccgactctggctttcccccaggtttatatgt

SEQ ID NO: 26427 - RNA, 33 nt, synthetic construct
  source 1..33: mol_type = other RNA
ccccgactctggctttcccccaggtttacatgt

SEQ ID NO: 26428 - RNA, 33 nt, synthetic construct
  source 1..33: mol_type = other RNA
ccccgactctggctttcccccaggtatacatgt

SEQ ID NO: 26429 - RNA, 33 nt, synthetic construct
  source 1..33: mol_type = other RNA
ccccgactctggctttcccccaggtgtacatgt

SEQ ID NO: 26430 - RNA, 33 nt, synthetic construct
  source 1..33: mol_type = other RNA
ccccgactctggctttcccccaggtatatatgt

SEQ ID NO: 26431 - RNA, 33 nt, synthetic construct
  source 1..33: mol_type = other RNA
ccccgactctggctttcccccaggtctatatgt

SEQ ID NO: 26432 - RNA, 33 nt, synthetic construct
  source 1..33: mol_type = other RNA
ccccgactctggctttcccccaggtctacatgt

SEQ ID NO: 26433 - RNA, 34 nt, synthetic construct
  source 1..34: mol_type = other RNA
cccccgactctggctttcccccaggtttacatgt

SEQ ID NO: 26434 - RNA, 34 nt, synthetic construct
  source 1..34: mol_type = other RNA
cccccgactctggctttcccccaggtatacatgt

SEQ ID NO: 26435 - RNA, 34 nt, synthetic construct
  source 1..34: mol_type = other RNA
cccccgactctggctttcccccaggtgtatatgt

SEQ ID NO: 26436 - RNA, 34 nt, synthetic construct
  source 1..34: mol_type = other RNA
cccccgactctggctttcccccaggtatatatgt

SEQ ID NO: 26437 - RNA, 34 nt, synthetic construct
  source 1..34: mol_type = other RNA
cccccgactctggctttcccccaggtctacatgt

SEQ ID NO: 26438 - RNA, 34 nt, synthetic construct
  source 1..34: mol_type = other RNA
cccccgactctggctttcccccaggtctatatgt

SEQ ID NO: 26439 - RNA, 34 nt, synthetic construct
  source 1..34: mol_type = other RNA
cccccgactctggctttcccccaggtttatatgt

SEQ ID NO: 26440 - RNA, 34 nt, synthetic construct
  source 1..34: mol_type = other RNA
cccccgactctggctttcccccaggtgtacatgt

SEQ ID NO: 26441 - RNA, 35 nt, synthetic construct
  source 1..35: mol_type = other RNA
tcccccgactctggctttcccccaggtttatatgt

SEQ ID NO: 26442 - RNA, 35 nt, synthetic construct
  source 1..35: mol_type = other RNA
tcccccgactctggctttcccccaggtatatatgt

SEQ ID NO: 26443 - RNA, 35 nt, synthetic construct
  source 1..35: mol_type = other RNA
tcccccgactctggctttcccccaggtctatatgt

SEQ ID NO: 26444 - RNA, 35 nt, synthetic construct
  source 1..35: mol_type = other RNA
tcccccgactctggctttcccccaggtctacatgt

SEQ ID NO: 26445 - RNA, 35 nt, synthetic construct
  source 1..35: mol_type = other RNA
tcccccgactctggctttcccccaggtatacatgt

SEQ ID NO: 26446 - RNA, 35 nt, synthetic construct
  source 1..35: mol_type = other RNA
tcccccgactctggctttcccccaggtgtacatgt

SEQ ID NO: 26447 - RNA, 35 nt, synthetic construct
  source 1..35: mol_type = other RNA
tcccccgactctggctttcccccaggtttacatgt

SEQ ID NO: 26448 - RNA, 35 nt, synthetic construct
  source 1..35: mol_type = other RNA
tcccccgactctggctttcccccaggtgtatatgt

SEQ ID NO: 26449 - RNA, 36 nt, synthetic construct
  source 1..36: mol_type = other RNA
gtcccccgactctggctttcccccaggtttatatgt

SEQ ID NO: 26450 - RNA, 36 nt, synthetic construct
  source 1..36: mol_type = other RNA
gtcccccgactctggctttcccccaggtgtacatgt

SEQ ID NO: 26451 - RNA, 36 nt, synthetic construct
  source 1..36: mol_type = other RNA
gtcccccgactctggctttcccccaggtgtatatgt

SEQ ID NO: 26452 - RNA, 36 nt, synthetic construct
  source 1..36: mol_type = other RNA
gtcccccgactctggctttcccccaggtttacatgt

SEQ ID NO: 26453 - RNA, 36 nt, synthetic construct
  source 1..36: mol_type = other RNA
gtcccccgactctggctttcccccaggtatacatgt

SEQ ID NO: 26454 - RNA, 36 nt, synthetic construct
  source 1..36: mol_type = other RNA
gtcccccgactctggctttcccccaggtctacatgt

SEQ ID NO: 26455 - RNA, 36 nt, synthetic construct
  source 1..36: mol_type = other RNA
gtcccccgactctggctttcccccaggtctatatgt

SEQ ID NO: 26456 - RNA, 36 nt, synthetic construct
  source 1..36: mol_type = other RNA
gtcccccgactctggctttcccccaggtatatatgt

SEQ ID NO: 26457 - RNA, 37 nt, synthetic construct
  source 1..37: mol_type = other RNA
ggtcccccgactctggctttcccccaggtctacatgt

SEQ ID NO: 26458 - RNA, 37 nt, synthetic construct
  source 1..37: mol_type = other RNA
ggtcccccgactctggctttcccccaggtatacatgt

SEQ ID NO: 26459 - RNA, 37 nt, synthetic construct
  source 1..37: mol_type = other RNA
ggtcccccgactctggctttcccccaggtatatatgt

SEQ ID NO: 26460 - RNA, 37 nt, synthetic construct
  source 1..37: mol_type = other RNA
ggtcccccgactctggctttcccccaggtttatatgt

SEQ ID NO: 26461 - RNA, 37 nt, synthetic construct
  source 1..37: mol_type = other RNA
ggtcccccgactctggctttcccccaggtctatatgt

SEQ ID NO: 26462 - RNA, 37 nt, synthetic construct
  source 1..37: mol_type = other RNA
ggtcccccgactctggctttcccccaggtgtacatgt

SEQ ID NO: 26463 - RNA, 37 nt, synthetic construct
  source 1..37: mol_type = other RNA
ggtcccccgactctggctttcccccaggtgtatatgt

SEQ ID NO: 26464 - RNA, 37 nt, synthetic construct
  source 1..37: mol_type = other RNA
ggtcccccgactctggctttcccccaggtttacatgt

SEQ ID NO: 26465 - RNA, 38 nt, synthetic construct
  source 1..38: mol_type = other RNA
gggtcccccgactctggctttcccccaggtctatatgt

SEQ ID NO: 26466 - RNA, 38 nt, synthetic construct
  source 1..38: mol_type = other RNA
gggtcccccgactctggctttcccccaggtatacatgt

SEQ ID NO: 26467 - RNA, 38 nt, synthetic construct
  source 1..38: mol_type = other RNA
gggtcccccgactctggctttcccccaggtctacatgt

SEQ ID NO: 26468 - RNA, 38 nt, synthetic construct
  source 1..38: mol_type = other RNA
gggtcccccgactctggctttcccccaggtatatatgt

SEQ ID NO: 26469 - RNA, 38 nt, synthetic construct
  source 1..38: mol_type = other RNA
gggtcccccgactctggctttcccccaggtgtacatgt

SEQ ID NO: 26470 - RNA, 38 nt, synthetic construct
  source 1..38: mol_type = other RNA
gggtcccccgactctggctttcccccaggtgtatatgt

SEQ ID NO: 26471 - RNA, 38 nt, synthetic construct
  source 1..38: mol_type = other RNA
gggtcccccgactctggctttcccccaggtttacatgt

SEQ ID NO: 26472 - RNA, 38 nt, synthetic construct
  source 1..38: mol_type = other RNA
gggtcccccgactctggctttcccccaggtttatatgt

SEQ ID NO: 26473 - RNA, 39 nt, synthetic construct
  source 1..39: mol_type = other RNA
ggggtcccccgactctggctttcccccaggtatacatgt

SEQ ID NO: 26474 - RNA, 39 nt, synthetic construct
  source 1..39: mol_type = other RNA
ggggtcccccgactctggctttcccccaggtatatatgt

SEQ ID NO: 26475 - RNA, 39 nt, synthetic construct
  source 1..39: mol_type = other RNA
ggggtcccccgactctggctttcccccaggtctacatgt

SEQ ID NO: 26476 - RNA, 39 nt, synthetic construct
  source 1..39: mol_type = other RNA
ggggtcccccgactctggctttcccccaggtctatatgt

SEQ ID NO: 26477 - RNA, 39 nt, synthetic construct
  source 1..39: mol_type = other RNA
ggggtcccccgactctggctttcccccaggtgtacatgt

SEQ ID NO: 26478 - RNA, 39 nt, synthetic construct
  source 1..39: mol_type = other RNA
ggggtcccccgactctggctttcccccaggtgtatatgt

SEQ ID NO: 26479 - RNA, 39 nt, synthetic construct
  source 1..39: mol_type = other RNA
ggggtcccccgactctggctttcccccaggtttacatgt

SEQ ID NO: 26480 - RNA, 39 nt, synthetic construct
  source 1..39: mol_type = other RNA
ggggtcccccgactctggctttcccccaggtttatatgt

SEQ ID NO: 26481 - RNA, 40 nt, synthetic construct
  source 1..40: mol_type = other RNA
tggggtcccccgactctggctttcccccaggtttacatgt

SEQ ID NO: 26482 - RNA, 40 nt, synthetic construct
  source 1..40: mol_type = other RNA
tggggtcccccgactctggctttcccccaggtttatatgt

SEQ ID NO: 26483 - RNA, 40 nt, synthetic construct
  source 1..40: mol_type = other RNA
tggggtcccccgactctggctttcccccaggtgtatatgt

SEQ ID NO: 26484 - RNA, 40 nt, synthetic construct
  source 1..40: mol_type = other RNA
tggggtcccccgactctggctttcccccaggtatacatgt

SEQ ID NO: 26485 - RNA, 40 nt, synthetic construct
  source 1..40: mol_type = other RNA
tggggtcccccgactctggctttcccccaggtctatatgt

SEQ ID NO: 26486 - RNA, 40 nt, synthetic construct
  source 1..40: mol_type = other RNA
tggggtcccccgactctggctttcccccaggtatatatgt

SEQ ID NO: 26487 - RNA, 40 nt, synthetic construct
  source 1..40: mol_type = other RNA
tggggtcccccgactctggctttcccccaggtgtacatgt

SEQ ID NO: 26488 - RNA, 40 nt, synthetic construct
  source 1..40: mol_type = other RNA
tggggtcccccgactctggctttcccccaggtctacatgt

SEQ ID NO: 26489 - RNA, 41 nt, synthetic construct
  source 1..41: mol_type = other RNA
atggggtcccccgactctggctttcccccaggtttatatgt

SEQ ID NO: 26490 - RNA, 41 nt, synthetic construct
  source 1..41: mol_type = other RNA
atggggtcccccgactctggctttcccccaggtgtatatgt

SEQ ID NO: 26491 - RNA, 41 nt, synthetic construct
  source 1..41: mol_type = other RNA
atggggtcccccgactctggctttcccccaggtgtacatgt

SEQ ID NO: 26492 - RNA, 41 nt, synthetic construct
  source 1..41: mol_type = other RNA
atggggtcccccgactctggctttcccccaggtctacatgt

SEQ ID NO: 26493 - RNA, 41 nt, synthetic construct
  source 1..41: mol_type = other RNA
atggggtcccccgactctggctttcccccaggtctatatgt

SEQ ID NO: 26494 - RNA, 41 nt, synthetic construct
  source 1..41: mol_type = other RNA
atggggtcccccgactctggctttcccccaggtttacatgt

SEQ ID NO: 26495 - RNA, 41 nt, synthetic construct
  source 1..41: mol_type = other RNA
atggggtcccccgactctggctttcccccaggtatacatgt

SEQ ID NO: 26496 - RNA, 41 nt, synthetic construct
  source 1..41: mol_type = other RNA
atggggtcccccgactctggctttcccccaggtatatatgt

SEQ ID NO: 26497 - RNA, 42 nt, synthetic construct
  source 1..42: mol_type = other RNA
aatggggtcccccgactctggctttcccccaggtttacatgt

SEQ ID NO: 26498 - RNA, 42 nt, synthetic construct
  source 1..42: mol_type = other RNA
aatggggtcccccgactctggctttcccccaggtatatatgt

SEQ ID NO: 26499 - RNA, 42 nt, synthetic construct
  source 1..42: mol_type = other RNA
aatggggtcccccgactctggctttcccccaggtctacatgt

SEQ ID NO: 26500 - RNA, 42 nt, synthetic construct
  source 1..42: mol_type = other RNA
aatggggtcccccgactctggctttcccccaggtctatatgt

SEQ ID NO: 26501 - RNA, 42 nt, synthetic construct
  source 1..42: mol_type = other RNA
aatggggtcccccgactctggctttcccccaggtgtacatgt

SEQ ID NO: 26502 - RNA, 42 nt, synthetic construct
  source 1..42: mol_type = other RNA
aatggggtcccccgactctggctttcccccaggtgtatatgt

SEQ ID NO: 26503 - RNA, 42 nt, synthetic construct
  source 1..42: mol_type = other RNA
aatggggtcccccgactctggctttcccccaggtttatatgt

SEQ ID NO: 26504 - RNA, 42 nt, synthetic construct
  source 1..42: mol_type = other RNA
aatggggtcccccgactctggctttcccccaggtatacatgt

SEQ ID NO: 26505 - RNA, 43 nt, synthetic construct
  source 1..43: mol_type = other RNA
gaatggggtcccccgactctggctttcccccaggtgtacatgt

SEQ ID NO: 26506 - RNA, 43 nt, synthetic construct
  source 1..43: mol_type = other RNA
gaatggggtcccccgactctggctttcccccaggtctatatgt

SEQ ID NO: 26507 - RNA, 43 nt, synthetic construct
  source 1..43: mol_type = other RNA
gaatggggtcccccgactctggctttcccccaggtctacatgt

SEQ ID NO: 26508 - RNA, 43 nt, synthetic construct
  source 1..43: mol_type = other RNA
gaatggggtcccccgactctggctttcccccaggtatacatgt

SEQ ID NO: 26509 - RNA, 43 nt, synthetic construct
  source 1..43: mol_type = other RNA
gaatggggtcccccgactctggctttcccccaggtatatatgt

SEQ ID NO: 26510 - RNA, 43 nt, synthetic construct
  source 1..43: mol_type = other RNA
gaatggggtcccccgactctggctttcccccaggtttacatgt

SEQ ID NO: 26511 - RNA, 43 nt, synthetic construct
  source 1..43: mol_type = other RNA
gaatggggtcccccgactctggctttcccccaggtgtatatgt

SEQ ID NO: 26512 - RNA, 43 nt, synthetic construct
  source 1..43: mol_type = other RNA
gaatggggtcccccgactctggctttcccccaggtttatatgt

SEQ ID NO: 26513 - RNA, 44 nt, synthetic construct
  source 1..44: mol_type = other RNA
tgaatggggtcccccgactctggctttcccccaggtgtacatgt

SEQ ID NO: 26514 - RNA, 44 nt, synthetic construct
  source 1..44: mol_type = other RNA
tgaatggggtcccccgactctggctttcccccaggtttatatgt

SEQ ID NO: 26515 - RNA, 44 nt, synthetic construct
  source 1..44: mol_type = other RNA
tgaatggggtcccccgactctggctttcccccaggtttacatgt

SEQ ID NO: 26516 - RNA, 44 nt, synthetic construct
  source 1..44: mol_type = other RNA
tgaatggggtcccccgactctggctttcccccaggtgtatatgt

SEQ ID NO: 26517 - RNA, 44 nt, synthetic construct
  source 1..44: mol_type = other RNA
tgaatggggtcccccgactctggctttcccccaggtatatatgt

SEQ ID NO: 26518 - RNA, 44 nt, synthetic construct
  source 1..44: mol_type = other RNA
tgaatggggtcccccgactctggctttcccccaggtatacatgt

SEQ ID NO: 26519 - RNA, 44 nt, synthetic construct
  source 1..44: mol_type = other RNA
tgaatggggtcccccgactctggctttcccccaggtctacatgt

SEQ ID NO: 26520 - RNA, 44 nt, synthetic construct
  source 1..44: mol_type = other RNA
tgaatggggtcccccgactctggctttcccccaggtctatatgt

SEQ ID NO: 26521 - RNA, 45 nt, synthetic construct
  source 1..45: mol_type = other RNA
ctgaatggggtcccccgactctggctttcccccaggtctacatgt

SEQ ID NO: 26522 - RNA, 45 nt, synthetic construct
  source 1..45: mol_type = other RNA
ctgaatggggtcccccgactctggctttcccccaggtttacatgt

SEQ ID NO: 26523 - RNA, 45 nt, synthetic construct
  source 1..45: mol_type = other RNA
ctgaatggggtcccccgactctggctttcccccaggtatacatgt

SEQ ID NO: 26524 - RNA, 45 nt, synthetic construct
  source 1..45: mol_type = other RNA
ctgaatggggtcccccgactctggctttcccccaggtatatatgt

SEQ ID NO: 26525 - RNA, 45 nt, synthetic construct
  source 1..45: mol_type = other RNA
ctgaatggggtcccccgactctggctttcccccaggtgtacatgt

SEQ ID NO: 26526 - RNA, 45 nt, synthetic construct
  source 1..45: mol_type = other RNA
ctgaatggggtcccccgactctggctttcccccaggtttatatgt

SEQ ID NO: 26527 - RNA, 45 nt, synthetic construct
  source 1..45: mol_type = other RNA
ctgaatggggtcccccgactctggctttcccccaggtgtatatgt

SEQ ID NO: 26528 - RNA, 45 nt, synthetic construct
  source 1..45: mol_type = other RNA
ctgaatggggtcccccgactctggctttcccccaggtctatatgt

SEQ ID NO: 26529 - RNA, 46 nt, synthetic construct
  source 1..46: mol_type = other RNA
gctgaatggggtcccccgactctggctttcccccaggtatatatgt

SEQ ID NO: 26530 - RNA, 46 nt, synthetic construct
  source 1..46: mol_type = other RNA
gctgaatggggtcccccgactctggctttcccccaggtgtacatgt

SEQ ID NO: 26531 - RNA, 46 nt, synthetic construct
  source 1..46: mol_type = other RNA
gctgaatggggtcccccgactctggctttcccccaggtctacatgt

SEQ ID NO: 26532 - RNA, 46 nt, synthetic construct
  source 1..46: mol_type = other RNA
gctgaatggggtcccccgactctggctttcccccaggtttatatgt

SEQ ID NO: 26533 - RNA, 46 nt, synthetic construct
  source 1..46: mol_type = other RNA
gctgaatggggtcccccgactctggctttcccccaggtatacatgt

SEQ ID NO: 26534 - RNA, 46 nt, synthetic construct
  source 1..46: mol_type = other RNA
gctgaatggggtcccccgactctggctttcccccaggtctatatgt

SEQ ID NO: 26535 - RNA, 46 nt, synthetic construct
  source 1..46: mol_type = other RNA
gctgaatggggtcccccgactctggctttcccccaggtttacatgt

SEQ ID NO: 26536 - RNA, 46 nt, synthetic construct
  source 1..46: mol_type = other RNA
gctgaatggggtcccccgactctggctttcccccaggtgtatatgt

SEQ ID NO: 26537 - RNA, 47 nt, synthetic construct
  source 1..47: mol_type = other RNA
ggctgaatggggtcccccgactctggctttcccccaggtttatatgt

SEQ ID NO: 26538 - RNA, 47 nt, synthetic construct
  source 1..47: mol_type = other RNA
ggctgaatggggtcccccgactctggctttcccccaggtttacatgt

SEQ ID NO: 26539 - RNA, 47 nt, synthetic construct
  source 1..47: mol_type = other RNA
ggctgaatggggtcccccgactctggctttcccccaggtgtacatgt

SEQ ID NO: 26540 - RNA, 47 nt, synthetic construct
  source 1..47: mol_type = other RNA
ggctgaatggggtcccccgactctggctttcccccaggtatacatgt

SEQ ID NO: 26541 - RNA, 47 nt, synthetic construct
  source 1..47: mol_type = other RNA
ggctgaatggggtcccccgactctggctttcccccaggtctacatgt

SEQ ID NO: 26542 - RNA, 47 nt, synthetic construct
  source 1..47: mol_type = other RNA
ggctgaatggggtcccccgactctggctttcccccaggtatatatgt

SEQ ID NO: 26543 - RNA, 47 nt, synthetic construct
  source 1..47: mol_type = other RNA
ggctgaatggggtcccccgactctggctttcccccaggtctatatgt

SEQ ID NO: 26544 - RNA, 47 nt, synthetic construct
  source 1..47: mol_type = other RNA
ggctgaatggggtcccccgactctggctttcccccaggtgtatatgt

SEQ ID NO: 26545 - RNA, 48 nt, synthetic construct
  source 1..48: mol_type = other RNA
aggctgaatggggtcccccgactctggctttcccccaggtttacatgt

SEQ ID NO: 26546 - RNA, 48 nt, synthetic construct
  source 1..48: mol_type = other RNA
aggctgaatggggtcccccgactctggctttcccccaggtgtatatgt

SEQ ID NO: 26547 - RNA, 48 nt, synthetic construct
  source 1..48: mol_type = other RNA
aggctgaatggggtcccccgactctggctttcccccaggtgtacatgt

SEQ ID NO: 26548 - RNA, 48 nt, synthetic construct
  source 1..48: mol_type = other RNA
aggctgaatggggtcccccgactctggctttcccccaggtctatatgt

SEQ ID NO: 26549 - RNA, 48 nt, synthetic construct
  source 1..48: mol_type = other RNA
aggctgaatggggtcccccgactctggctttcccccaggtttatatgt

SEQ ID NO: 26550 - RNA, 48 nt, synthetic construct
  source 1..48: mol_type = other RNA
aggctgaatggggtcccccgactctggctttcccccaggtatatatgt

SEQ ID NO: 26551 - RNA, 48 nt, synthetic construct
  source 1..48: mol_type = other RNA
aggctgaatggggtcccccgactctggctttcccccaggtatacatgt

SEQ ID NO: 26552 - RNA, 48 nt, synthetic construct
  source 1..48: mol_type = other RNA
aggctgaatggggtcccccgactctggctttcccccaggtctacatgt

SEQ ID NO: 26553 - RNA, 49 nt, synthetic construct
  source 1..49: mol_type = other RNA
gaggctgaatggggtcccccgactctggctttcccccaggtctatatgt

SEQ ID NO: 26554 - RNA, 49 nt, synthetic construct
  source 1..49: mol_type = other RNA
gaggctgaatggggtcccccgactctggctttcccccaggtttatatgt

SEQ ID NO: 26555 - RNA, 49 nt, synthetic construct
  source 1..49: mol_type = other RNA
gaggctgaatggggtcccccgactctggctttcccccaggtgtatatgt

SEQ ID NO: 26556 - RNA, 49 nt, synthetic construct
  source 1..49: mol_type = other RNA
gaggctgaatggggtcccccgactctggctttcccccaggtgtacatgt

SEQ ID NO: 26557 - RNA, 49 nt, synthetic construct
  source 1..49: mol_type = other RNA
gaggctgaatggggtcccccgactctggctttcccccaggtttacatgt

SEQ ID NO: 26558 - RNA, 49 nt, synthetic construct
  source 1..49: mol_type = other RNA
gaggctgaatggggtcccccgactctggctttcccccaggtatatatgt

SEQ ID NO: 26559 - RNA, 49 nt, synthetic construct
  source 1..49: mol_type = other RNA
gaggctgaatggggtcccccgactctggctttcccccaggtatacatgt

SEQ ID NO: 26560 - RNA, 49 nt, synthetic construct
  source 1..49: mol_type = other RNA
gaggctgaatggggtcccccgactctggctttcccccaggtctacatgt

SEQ ID NO: 26561 - RNA, 50 nt, synthetic construct
  source 1..50: mol_type = other RNA
ggaggctgaatggggtcccccgactctggctttcccccaggtttatatgt

SEQ ID NO: 26562 - RNA, 50 nt, synthetic construct
  source 1..50: mol_type = other RNA
ggaggctgaatggggtcccccgactctggctttcccccaggtgtatatgt

SEQ ID NO: 26563 - RNA, 50 nt, synthetic construct
  source 1..50: mol_type = other RNA
ggaggctgaatggggtcccccgactctggctttcccccaggtgtacatgt

SEQ ID NO: 26564 - RNA, 50 nt, synthetic construct
  source 1..50: mol_type = other RNA
ggaggctgaatggggtcccccgactctggctttcccccaggtctatatgt

SEQ ID NO: 26565 - RNA, 50 nt, synthetic construct
  source 1..50: mol_type = other RNA
ggaggctgaatggggtcccccgactctggctttcccccaggtttacatgt

SEQ ID NO: 26566 - RNA, 50 nt, synthetic construct
  source 1..50: mol_type = other RNA
ggaggctgaatggggtcccccgactctggctttcccccaggtatatatgt

SEQ ID NO: 26567 - RNA, 50 nt, synthetic construct
  source 1..50: mol_type = other RNA
ggaggctgaatggggtcccccgactctggctttcccccaggtatacatgt

SEQ ID NO: 26568 - RNA, 50 nt, synthetic construct
  source 1..50: mol_type = other RNA
ggaggctgaatggggtcccccgactctggctttcccccaggtctacatgt

SEQ ID NO: 26569 - RNA, 51 nt, synthetic construct
  source 1..51: mol_type = other RNA
tggaggctgaatggggtcccccgactctggctttcccccaggtatacatgt

SEQ ID NO: 26570 - RNA, 51 nt, synthetic construct
  source 1..51: mol_type = other RNA
tggaggctgaatggggtcccccgactctggctttcccccaggtgtatatgt

SEQ ID NO: 26571 - RNA, 51 nt, synthetic construct
  source 1..51: mol_type = other RNA
tggaggctgaatggggtcccccgactctggctttcccccaggtttatatgt

SEQ ID NO: 26572 - RNA, 51 nt, synthetic construct
  source 1..51: mol_type = other RNA
tggaggctgaatggggtcccccgactctggctttcccccaggtttacatgt

SEQ ID NO: 26573 - RNA, 51 nt, synthetic construct
  source 1..51: mol_type = other RNA
tggaggctgaatggggtcccccgactctggctttcccccaggtctacatgt

SEQ ID NO: 26574 - RNA, 51 nt, synthetic construct
  source 1..51: mol_type = other RNA
tggaggctgaatggggtcccccgactctggctttcccccaggtctatatgt

SEQ ID NO: 26575 - RNA, 51 nt, synthetic construct
  source 1..51: mol_type = other RNA
tggaggctgaatggggtcccccgactctggctttcccccaggtgtacatgt

SEQ ID NO: 26576 - RNA, 51 nt, synthetic construct
  source 1..51: mol_type = other RNA
tggaggctgaatggggtcccccgactctggctttcccccaggtatatatgt

SEQ ID NO: 26577 - RNA, 52 nt, synthetic construct
  source 1..52: mol_type = other RNA
ttggaggctgaatggggtcccccgactctggctttcccccaggtgtacatgt

SEQ ID NO: 26578 - RNA, 52 nt, synthetic construct
  source 1..52: mol_type = other RNA
ttggaggctgaatggggtcccccgactctggctttcccccaggtatatatgt

SEQ ID NO: 26579 - RNA, 52 nt, synthetic construct
  source 1..52: mol_type = other RNA
ttggaggctgaatggggtcccccgactctggctttcccccaggtatacatgt

SEQ ID NO: 26580 - RNA, 52 nt, synthetic construct
  source 1..52: mol_type = other RNA
ttggaggctgaatggggtcccccgactctggctttcccccaggtctacatgt

SEQ ID NO: 26581 - RNA, 52 nt, synthetic construct
  source 1..52: mol_type = other RNA
ttggaggctgaatggggtcccccgactctggctttcccccaggtgtatatgt

SEQ ID NO: 26582 - RNA, 52 nt, synthetic construct
  source 1..52: mol_type = other RNA
ttggaggctgaatggggtcccccgactctggctttcccccaggtttacatgt

SEQ ID NO: 26583 - RNA, 52 nt, synthetic construct
  source 1..52: mol_type = other RNA
ttggaggctgaatggggtcccccgactctggctttcccccaggtttatatgt

SEQ ID NO: 26584 - RNA, 52 nt, synthetic construct
  source 1..52: mol_type = other RNA
ttggaggctgaatggggtcccccgactctggctttcccccaggtctatatgt

SEQ ID NO: 26585 - RNA, 53 nt, synthetic construct
  source 1..53: mol_type = other RNA
tttggaggctgaatggggtcccccgactctggctttcccccaggtttacatgt

SEQ ID NO: 26586 - RNA, 53 nt, synthetic construct
  source 1..53: mol_type = other RNA
tttggaggctgaatggggtcccccgactctggctttcccccaggtatacatgt

SEQ ID NO: 26587 - RNA, 53 nt, synthetic construct
  source 1..53: mol_type = other RNA
tttggaggctgaatggggtcccccgactctggctttcccccaggtatatatgt

SEQ ID NO: 26588 - RNA, 53 nt, synthetic construct
  source 1..53: mol_type = other RNA
tttggaggctgaatggggtcccccgactctggctttcccccaggtctacatgt

SEQ ID NO: 26589 - RNA, 53 nt, synthetic construct
  source 1..53: mol_type = other RNA
tttggaggctgaatggggtcccccgactctggctttcccccaggtctatatgt

SEQ ID NO: 26590 - RNA, 53 nt, synthetic construct
  source 1..53: mol_type = other RNA
tttggaggctgaatggggtcccccgactctggctttcccccaggtgtacatgt

SEQ ID NO: 26591 - RNA, 53 nt, synthetic construct
  source 1..53: mol_type = other RNA
tttggaggctgaatggggtcccccgactctggctttcccccaggtgtatatgt

SEQ ID NO: 26592 - RNA, 53 nt, synthetic construct
  source 1..53: mol_type = other RNA
tttggaggctgaatggggtcccccgactctggctttcccccaggtttatatgt

SEQ ID NO: 26593 - RNA, 54 nt, synthetic construct
  source 1..54: mol_type = other RNA
ctttggaggctgaatggggtcccccgactctggctttcccccaggtgtatatgt

SEQ ID NO: 26594 - RNA, 54 nt, synthetic construct
  source 1..54: mol_type = other RNA
ctttggaggctgaatggggtcccccgactctggctttcccccaggtgtacatgt

SEQ ID NO: 26595 - RNA, 54 nt, synthetic construct
  source 1..54: mol_type = other RNA
ctttggaggctgaatggggtcccccgactctggctttcccccaggtatacatgt

SEQ ID NO: 26596 - RNA, 54 nt, synthetic construct
  source 1..54: mol_type = other RNA
ctttggaggctgaatggggtcccccgactctggctttcccccaggtctacatgt

SEQ ID NO: 26597 - RNA, 54 nt, synthetic construct
  source 1..54: mol_type = other RNA
ctttggaggctgaatggggtcccccgactctggctttcccccaggtatatatgt

SEQ ID NO: 26598 - RNA, 54 nt, synthetic construct
  source 1..54: mol_type = other RNA
ctttggaggctgaatggggtcccccgactctggctttcccccaggtttacatgt

SEQ ID NO: 26599 - RNA, 54 nt, synthetic construct
  source 1..54: mol_type = other RNA
ctttggaggctgaatggggtcccccgactctggctttcccccaggtttatatgt

SEQ ID NO: 26600 - RNA, 54 nt, synthetic construct
  source 1..54: mol_type = other RNA
ctttggaggctgaatggggtcccccgactctggctttcccccaggtctatatgt

SEQ ID NO: 26601 - RNA, 55 nt, synthetic construct
  source 1..55: mol_type = other RNA
tctttggaggctgaatggggtcccccgactctggctttcccccaggtttacatgt

SEQ ID NO: 26602 - RNA, 55 nt, synthetic construct
  source 1..55: mol_type = other RNA
tctttggaggctgaatggggtcccccgactctggctttcccccaggtgtatatgt

SEQ ID NO: 26603 - RNA, 55 nt, synthetic construct
  source 1..55: mol_type = other RNA
tctttggaggctgaatggggtcccccgactctggctttcccccaggtgtacatgt

SEQ ID NO: 26604 - RNA, 55 nt, synthetic construct
  source 1..55: mol_type = other RNA
tctttggaggctgaatggggtcccccgactctggctttcccccaggtatatatgt

SEQ ID NO: 26605 - RNA, 55 nt, synthetic construct
  source 1..55: mol_type = other RNA
tctttggaggctgaatggggtcccccgactctggctttcccccaggtctacatgt

SEQ ID NO: 26606 - RNA, 55 nt, synthetic construct
  source 1..55: mol_type = other RNA
tctttggaggctgaatggggtcccccgactctggctttcccccaggtatacatgt

SEQ ID NO: 26607 - RNA, 55 nt, synthetic construct
  source 1..55: mol_type = other RNA
tctttggaggctgaatggggtcccccgactctggctttcccccaggtctatatgt

SEQ ID NO: 26608 - RNA, 55 nt, synthetic construct
  source 1..55: mol_type = other RNA
tctttggaggctgaatggggtcccccgactctggctttcccccaggtttatatgt

SEQ ID NO: 26609 - RNA, 56 nt, synthetic construct
  source 1..56: mol_type = other RNA
ctctttggaggctgaatggggtcccccgactctggctttcccccaggtttacatgt

SEQ ID NO: 26610 - RNA, 56 nt, synthetic construct
  source 1..56: mol_type = other RNA
ctctttggaggctgaatggggtcccccgactctggctttcccccaggtatacatgt

SEQ ID NO: 26611 - RNA, 56 nt, synthetic construct
  source 1..56: mol_type = other RNA
ctctttggaggctgaatggggtcccccgactctggctttcccccaggtatatatgt

SEQ ID NO: 26612 - RNA, 56 nt, synthetic construct
  source 1..56: mol_type = other RNA
ctctttggaggctgaatggggtcccccgactctggctttcccccaggtctacatgt

SEQ ID NO: 26613 - RNA, 56 nt, synthetic construct
  source 1..56: mol_type = other RNA
ctctttggaggctgaatggggtcccccgactctggctttcccccaggtctatatgt

SEQ ID NO: 26614 - RNA, 56 nt, synthetic construct
  source 1..56: mol_type = other RNA
ctctttggaggctgaatggggtcccccgactctggctttcccccaggtgtatatgt

SEQ ID NO: 26615 - RNA, 56 nt, synthetic construct
  source 1..56: mol_type = other RNA
ctctttggaggctgaatggggtcccccgactctggctttcccccaggtttatatgt

SEQ ID NO: 26616 - RNA, 56 nt, synthetic construct
  source 1..56: mol_type = other RNA
ctctttggaggctgaatggggtcccccgactctggctttcccccaggtgtacatgt

SEQ ID NO: 26617 - RNA, 57 nt, synthetic construct
  source 1..57: mol_type = other RNA
cctctttggaggctgaatggggtcccccgactctggctttcccccaggtgtacatgt

SEQ ID NO: 26618 - RNA, 57 nt, synthetic construct
  source 1..57: mol_type = other RNA
cctctttggaggctgaatggggtcccccgactctggctttcccccaggtgtatatgt

SEQ ID NO: 26619 - RNA, 57 nt, synthetic construct
  source 1..57: mol_type = other RNA
cctctttggaggctgaatggggtcccccgactctggctttcccccaggtttacatgt

SEQ ID NO: 26620 - RNA, 57 nt, synthetic construct
  source 1..57: mol_type = other RNA
cctctttggaggctgaatggggtcccccgactctggctttcccccaggtttatatgt

SEQ ID NO: 26621 - RNA, 57 nt, synthetic construct
  source 1..57: mol_type = other RNA
cctctttggaggctgaatggggtcccccgactctggctttcccccaggtatacatgt

SEQ ID NO: 26622 - RNA, 57 nt, synthetic construct
  source 1..57: mol_type = other RNA
cctctttggaggctgaatggggtcccccgactctggctttcccccaggtctatatgt

SEQ ID NO: 26623 - RNA, 57 nt, synthetic construct
  source 1..57: mol_type = other RNA
cctctttggaggctgaatggggtcccccgactctggctttcccccaggtatatatgt

SEQ ID NO: 26624 - RNA, 57 nt, synthetic construct
  source 1..57: mol_type = other RNA
cctctttggaggctgaatggggtcccccgactctggctttcccccaggtctacatgt

SEQ ID NO: 26625 - RNA, 58 nt, synthetic construct
  source 1..58: mol_type = other RNA
gcctctttggaggctgaatggggtcccccgactctggctttcccccaggtgtatatgt

SEQ ID NO: 26626 - RNA, 58 nt, synthetic construct
  source 1..58: mol_type = other RNA
gcctctttggaggctgaatggggtcccccgactctggctttcccccaggtctacatgt

SEQ ID NO: 26627 - RNA, 58 nt, synthetic construct
  source 1..58: mol_type = other RNA
gcctctttggaggctgaatggggtcccccgactctggctttcccccaggtatacatgt

SEQ ID NO: 26628 - RNA, 58 nt, synthetic construct
  source 1..58: mol_type = other RNA
gcctctttggaggctgaatggggtcccccgactctggctttcccccaggtatatatgt

SEQ ID NO: 26629 - RNA, 58 nt, synthetic construct
  source 1..58: mol_type = other RNA
gcctctttggaggctgaatggggtcccccgactctggctttcccccaggtttatatgt

SEQ ID NO: 26630 - RNA, 58 nt, synthetic construct
  source 1..58: mol_type = other RNA
gcctctttggaggctgaatggggtcccccgactctggctttcccccaggtctatatgt

SEQ ID NO: 26631 - RNA, 58 nt, synthetic construct
  source 1..58: mol_type = other RNA
gcctctttggaggctgaatggggtcccccgactctggctttcccccaggtgtacatgt

SEQ ID NO: 26632 - RNA, 58 nt, synthetic construct
  source 1..58: mol_type = other RNA
gcctctttggaggctgaatggggtcccccgactctggctttcccccaggtttacatgt

SEQ ID NO: 26633 - RNA, 59 nt, synthetic construct
  source 1..59: mol_type = other RNA
agcctctttggaggctgaatggggtcccccgactctggctttcccccaggtatacatgt

SEQ ID NO: 26634 - RNA, 59 nt, synthetic construct
  source 1..59: mol_type = other RNA
agcctctttggaggctgaatggggtcccccgactctggctttcccccaggtctatatgt

SEQ ID NO: 26635 - RNA, 59 nt, synthetic construct
  source 1..59: mol_type = other RNA
agcctctttggaggctgaatggggtcccccgactctggctttcccccaggtctacatgt

SEQ ID NO: 26636 - RNA, 59 nt, synthetic construct
  source 1..59: mol_type = other RNA
agcctctttggaggctgaatggggtcccccgactctggctttcccccaggtatatatgt

SEQ ID NO: 26637 - RNA, 59 nt, synthetic construct
  source 1..59: mol_type = other RNA
agcctctttggaggctgaatggggtcccccgactctggctttcccccaggtttacatgt

SEQ ID NO: 26638 - RNA, 59 nt, synthetic construct
  source 1..59: mol_type = other RNA
agcctctttggaggctgaatggggtcccccgactctggctttcccccaggtttatatgt

SEQ ID NO: 26639 - RNA, 59 nt, synthetic construct
  source 1..59: mol_type = other RNA
agcctctttggaggctgaatggggtcccccgactctggctttcccccaggtgtacatgt

SEQ ID NO: 26640 - RNA, 59 nt, synthetic construct
  source 1..59: mol_type = other RNA
agcctctttggaggctgaatggggtcccccgactctggctttcccccaggtgtatatgt

SEQ ID NO: 26641 - RNA, 60 nt, synthetic construct
  source 1..60: mol_type = other RNA
aagcctctttggaggctgaatggggtcccccgactctggctttcccccaggtatacatgt

SEQ ID NO: 26642 - RNA, 60 nt, synthetic construct
  source 1..60: mol_type = other RNA
aagcctctttggaggctgaatggggtcccccgactctggctttcccccaggtttatatgt

SEQ ID NO: 26643 - RNA, 60 nt, synthetic construct
  source 1..60: mol_type = other RNA
aagcctctttggaggctgaatggggtcccccgactctggctttcccccaggtctatatgt

SEQ ID NO: 26644 - RNA, 60 nt, synthetic construct
  source 1..60: mol_type = other RNA
aagcctctttggaggctgaatggggtcccccgactctggctttcccccaggtgtatatgt

SEQ ID NO: 26645 - RNA, 60 nt, synthetic construct
  source 1..60: mol_type = other RNA
aagcctctttggaggctgaatggggtcccccgactctggctttcccccaggtctacatgt

SEQ ID NO: 26646 - RNA, 60 nt, synthetic construct
  source 1..60: mol_type = other RNA
aagcctctttggaggctgaatggggtcccccgactctggctttcccccaggtatatatgt

SEQ ID NO: 26647 - RNA, 60 nt, synthetic construct
  source 1..60: mol_type = other RNA
aagcctctttggaggctgaatggggtcccccgactctggctttcccccaggtgtacatgt

SEQ ID NO: 26648 - RNA, 60 nt, synthetic construct
  source 1..60: mol_type = other RNA
aagcctctttggaggctgaatggggtcccccgactctggctttcccccaggtttacatgt

SEQ ID NO: 26649 - RNA, 61 nt, synthetic construct
  source 1..61: mol_type = other RNA
aaagcctctttggaggctgaatggggtcccccgactctggctttcccccaggtctacatgt

SEQ ID NO: 26650 - RNA, 61 nt, synthetic construct
  source 1..61: mol_type = other RNA
aaagcctctttggaggctgaatggggtcccccgactctggctttcccccaggtgtatatgt

SEQ ID NO: 26651 - RNA, 61 nt, synthetic construct
  source 1..61: mol_type = other RNA
aaagcctctttggaggctgaatggggtcccccgactctggctttcccccaggtctatatgt

SEQ ID NO: 26652 - RNA, 61 nt, synthetic construct
  source 1..61: mol_type = other RNA
aaagcctctttggaggctgaatggggtcccccgactctggctttcccccaggtttatatgt

SEQ ID NO: 26653 - RNA, 61 nt, synthetic construct
  source 1..61: mol_type = other RNA
aaagcctctttggaggctgaatggggtcccccgactctggctttcccccaggtttacatgt

SEQ ID NO: 26654 - RNA, 61 nt, synthetic construct
  source 1..61: mol_type = other RNA
aaagcctctttggaggctgaatggggtcccccgactctggctttcccccaggtgtacatgt

SEQ ID NO: 26655 - RNA, 61 nt, synthetic construct
  source 1..61: mol_type = other RNA
aaagcctctttggaggctgaatggggtcccccgactctggctttcccccaggtatatatgt

SEQ ID NO: 26656 - RNA, 61 nt, synthetic construct
  source 1..61: mol_type = other RNA
aaagcctctttggaggctgaatggggtcccccgactctggctttcccccaggtatacatgt

SEQ ID NO: 26657 - RNA, 62 nt, synthetic construct
  source 1..62: mol_type = other RNA
caaagcctctttggaggctgaatggggtcccccgactctggctttcccccaggtctatatgt

SEQ ID NO: 26658 - RNA, 62 nt, synthetic construct
  source 1..62: mol_type = other RNA
caaagcctctttggaggctgaatggggtcccccgactctggctttcccccaggtatacatgt

SEQ ID NO: 26659 - RNA, 62 nt, synthetic construct
  source 1..62: mol_type = other RNA
caaagcctctttggaggctgaatggggtcccccgactctggctttcccccaggtgtacatgt

SEQ ID NO: 26660 - RNA, 62 nt, synthetic construct
  source 1..62: mol_type = other RNA
caaagcctctttggaggctgaatggggtcccccgactctggctttcccccaggtgtatatgt

SEQ ID NO: 26661 - RNA, 62 nt, synthetic construct
  source 1..62: mol_type = other RNA
caaagcctctttggaggctgaatggggtcccccgactctggctttcccccaggtttacatgt

SEQ ID NO: 26662 - RNA, 62 nt, synthetic construct
  source 1..62: mol_type = other RNA
caaagcctctttggaggctgaatggggtcccccgactctggctttcccccaggtttatatgt

SEQ ID NO: 26663 - RNA, 62 nt, synthetic construct
  source 1..62: mol_type = other RNA
caaagcctctttggaggctgaatggggtcccccgactctggctttcccccaggtatatatgt

SEQ ID NO: 26664 - RNA, 62 nt, synthetic construct
  source 1..62: mol_type = other RNA
caaagcctctttggaggctgaatggggtcccccgactctggctttcccccaggtctacatgt

SEQ ID NO: 26665 - RNA, 63 nt, synthetic construct
  source 1..63: mol_type = other RNA
gcaaagcctctttggaggctgaatggggtcccccgactctggctttcccccaggtgtacatgt

SEQ ID NO: 26666 - RNA, 63 nt, synthetic construct
  source 1..63: mol_type = other RNA
gcaaagcctctttggaggctgaatggggtcccccgactctggctttcccccaggtctacatgt

SEQ ID NO: 26667 - RNA, 63 nt, synthetic construct
  source 1..63: mol_type = other RNA
gcaaagcctctttggaggctgaatggggtcccccgactctggctttcccccaggtttatatgt

SEQ ID NO: 26668 - RNA, 63 nt, synthetic construct
  source 1..63: mol_type = other RNA
gcaaagcctctttggaggctgaatggggtcccccgactctggctttcccccaggtttacatgt

SEQ ID NO: 26669 - RNA, 63 nt, synthetic construct
  source 1..63: mol_type = other RNA
gcaaagcctctttggaggctgaatggggtcccccgactctggctttcccccaggtctatatgt

SEQ ID NO: 26670 - RNA, 63 nt, synthetic construct
  source 1..63: mol_type = other RNA
gcaaagcctctttggaggctgaatggggtcccccgactctggctttcccccaggtatatatgt

SEQ ID NO: 26671 - RNA, 63 nt, synthetic construct
  source 1..63: mol_type = other RNA
gcaaagcctctttggaggctgaatggggtcccccgactctggctttcccccaggtatacatgt

SEQ ID NO: 26672 - RNA, 63 nt, synthetic construct
  source 1..63: mol_type = other RNA
gcaaagcctctttggaggctgaatggggtcccccgactctggctttcccccaggtgtatatgt

SEQ ID NO: 26673 - RNA, 64 nt, synthetic construct
  source 1..64: mol_type = other RNA
agcaaagcctctttggaggctgaatggggtcccccgactctggctttcccccaggtttatatgt

SEQ ID NO: 26674 - RNA, 64 nt, synthetic construct
  source 1..64: mol_type = other RNA
agcaaagcctctttggaggctgaatggggtcccccgactctggctttcccccaggtttacatgt

SEQ ID NO: 26675 - RNA, 64 nt, synthetic construct
  source 1..64: mol_type = other RNA
agcaaagcctctttggaggctgaatggggtcccccgactctggctttcccccaggtgtatatgt

SEQ ID NO: 26676 - RNA, 64 nt, synthetic construct
  source 1..64: mol_type = other RNA
agcaaagcctctttggaggctgaatggggtcccccgactctggctttcccccaggtgtacatgt

SEQ ID NO: 26677 - RNA, 64 nt, synthetic construct
  source 1..64: mol_type = other RNA
agcaaagcctctttggaggctgaatggggtcccccgactctggctttcccccaggtatatatgt

SEQ ID NO: 26678 - RNA, 64 nt, synthetic construct
  source 1..64: mol_type = other RNA
agcaaagcctctttggaggctgaatggggtcccccgactctggctttcccccaggtctacatgt

SEQ ID NO: 26679 - RNA, 64 nt, synthetic construct
  source 1..64: mol_type = other RNA
agcaaagcctctttggaggctgaatggggtcccccgactctggctttcccccaggtatacatgt

SEQ ID NO: 26680 - RNA, 64 nt, synthetic construct
  source 1..64: mol_type = other RNA
agcaaagcctctttggaggctgaatggggtcccccgactctggctttcccccaggtctatatgt

SEQ ID NO: 26681 - RNA, 65 nt, synthetic construct
  source 1..65: mol_type = other RNA
cagcaaagcctctttggaggctgaatggggtcccccgactctggctttcccccaggtctacatgt

SEQ ID NO: 26682 - RNA, 65 nt, synthetic construct
  source 1..65: mol_type = other RNA
cagcaaagcctctttggaggctgaatggggtcccccgactctggctttcccccaggtgtatatgt

SEQ ID NO: 26683 - RNA, 65 nt, synthetic construct
  source 1..65: mol_type = other RNA
cagcaaagcctctttggaggctgaatggggtcccccgactctggctttcccccaggtttatatgt

SEQ ID NO: 26684 - RNA, 65 nt, synthetic construct
  source 1..65: mol_type = other RNA
cagcaaagcctctttggaggctgaatggggtcccccgactctggctttcccccaggtgtacatgt

SEQ ID NO: 26685 - RNA, 65 nt, synthetic construct
  source 1..65: mol_type = other RNA
cagcaaagcctctttggaggctgaatggggtcccccgactctggctttcccccaggtttacatgt

SEQ ID NO: 26686 - RNA, 65 nt, synthetic construct
  source 1..65: mol_type = other RNA
cagcaaagcctctttggaggctgaatggggtcccccgactctggctttcccccaggtatatatgt

SEQ ID NO: 26687 - RNA, 65 nt, synthetic construct
  source 1..65: mol_type = other RNA
cagcaaagcctctttggaggctgaatggggtcccccgactctggctttcccccaggtatacatgt

SEQ ID NO: 26688 - RNA, 65 nt, synthetic construct
  source 1..65: mol_type = other RNA
cagcaaagcctctttggaggctgaatggggtcccccgactctggctttcccccaggtctatatgt

SEQ ID NO: 26689 - RNA, 66 nt, synthetic construct
  source 1..66: mol_type = other RNA
acagcaaagcctctttggaggctgaatggggtcccccgactctggctttcccccaggtctacatgt

SEQ ID NO: 26690 - RNA, 66 nt, synthetic construct
  source 1..66: mol_type = other RNA
acagcaaagcctctttggaggctgaatggggtcccccgactctggctttcccccaggtatatatgt

SEQ ID NO: 26691 - RNA, 66 nt, synthetic construct
  source 1..66: mol_type = other RNA
acagcaaagcctctttggaggctgaatggggtcccccgactctggctttcccccaggtatacatgt

SEQ ID NO: 26692 - RNA, 66 nt, synthetic construct
  source 1..66: mol_type = other RNA
acagcaaagcctctttggaggctgaatggggtcccccgactctggctttcccccaggtgtacatgt

SEQ ID NO: 26693 - RNA, 66 nt, synthetic construct
  source 1..66: mol_type = other RNA
acagcaaagcctctttggaggctgaatggggtcccccgactctggctttcccccaggtctatatgt

SEQ ID NO: 26694 - RNA, 66 nt, synthetic construct
  source 1..66: mol_type = other RNA
acagcaaagcctctttggaggctgaatggggtcccccgactctggctttcccccaggtttatatgt

SEQ ID NO: 26695 - RNA, 66 nt, synthetic construct
  source 1..66: mol_type = other RNA
acagcaaagcctctttggaggctgaatggggtcccccgactctggctttcccccaggtttacatgt

SEQ ID NO: 26696 - RNA, 66 nt, synthetic construct
  source 1..66: mol_type = other RNA
acagcaaagcctctttggaggctgaatggggtcccccgactctggctttcccccaggtgtatatgt

SEQ ID NO: 26697 - RNA, 67 nt, synthetic construct
  source 1..67: mol_type = other RNA
cacagcaaagcctctttggaggctgaatggggtcccccgactctggctttcccccaggtatatatgt

SEQ ID NO: 26698 - RNA, 67 nt, synthetic construct
  source 1..67: mol_type = other RNA
cacagcaaagcctctttggaggctgaatggggtcccccgactctggctttcccccaggtatacatgt

SEQ ID NO: 26699 - RNA, 67 nt, synthetic construct
  source 1..67: mol_type = other RNA
cacagcaaagcctctttggaggctgaatggggtcccccgactctggctttcccccaggtgtatatgt

SEQ ID NO: 26700 - RNA, 67 nt, synthetic construct
  source 1..67: mol_type = other RNA
cacagcaaagcctctttggaggctgaatggggtcccccgactctggctttcccccaggtctatatgt

SEQ ID NO: 26701 - RNA, 67 nt, synthetic construct
  source 1..67: mol_type = other RNA
cacagcaaagcctctttggaggctgaatggggtcccccgactctggctttcccccaggtttatatgt

SEQ ID NO: 26702 - RNA, 67 nt, synthetic construct
  source 1..67: mol_type = other RNA
cacagcaaagcctctttggaggctgaatggggtcccccgactctggctttcccccaggtctacatgt

SEQ ID NO: 26703 - RNA, 67 nt, synthetic construct
  source 1..67: mol_type = other RNA
cacagcaaagcctctttggaggctgaatggggtcccccgactctggctttcccccaggtgtacatgt

SEQ ID NO: 26704 - RNA, 67 nt, synthetic construct
  source 1..67: mol_type = other RNA
cacagcaaagcctctttggaggctgaatggggtcccccgactctggctttcccccaggtttacatgt

SEQ ID NO: 26705 - RNA, 68 nt, synthetic construct
  source 1..68: mol_type = other RNA
acacagcaaagcctctttggaggctgaatggggtcccccgactctggctttcccccaggtatacatgt

SEQ ID NO: 26706 - RNA, 68 nt, synthetic construct
  source 1..68: mol_type = other RNA
acacagcaaagcctctttggaggctgaatggggtcccccgactctggctttcccccaggtatatatgt

SEQ ID NO: 26707 - RNA, 68 nt, synthetic construct
  source 1..68: mol_type = other RNA
acacagcaaagcctctttggaggctgaatggggtcccccgactctggctttcccccaggtctacatgt

SEQ ID NO: 26708 - RNA, 68 nt, synthetic construct
  source 1..68: mol_type = other RNA
acacagcaaagcctctttggaggctgaatggggtcccccgactctggctttcccccaggtttacatgt

SEQ ID NO: 26709 - RNA, 68 nt, synthetic construct
  source 1..68: mol_type = other RNA
acacagcaaagcctctttggaggctgaatggggtcccccgactctggctttcccccaggtttatatgt

SEQ ID NO: 26710 - RNA, 68 nt, synthetic construct
  source 1..68: mol_type = other RNA
acacagcaaagcctctttggaggctgaatggggtcccccgactctggctttcccccaggtgtatatgt

SEQ ID NO: 26711 - RNA, 68 nt, synthetic construct
  source 1..68: mol_type = other RNA
acacagcaaagcctctttggaggctgaatggggtcccccgactctggctttcccccaggtgtacatgt

SEQ ID NO: 26712 - RNA, 68 nt, synthetic construct
  source 1..68: mol_type = other RNA
acacagcaaagcctctttggaggctgaatggggtcccccgactctggctttcccccaggtctatatgt

SEQ ID NO: 26713 - RNA, 69 nt, synthetic construct
  source 1..69: mol_type = other RNA
cacacagcaaagcctctttggaggctgaatggggtcccccgactctggctttcccccaggtttacatgt

SEQ ID NO: 26714 - RNA, 69 nt, synthetic construct
  source 1..69: mol_type = other RNA
cacacagcaaagcctctttggaggctgaatggggtcccccgactctggctttcccccaggtgtatatgt

SEQ ID NO: 26715 - RNA, 69 nt, synthetic construct
  source 1..69: mol_type = other RNA
cacacagcaaagcctctttggaggctgaatggggtcccccgactctggctttcccccaggtgtacatgt

SEQ ID NO: 26716 - RNA, 69 nt, synthetic construct
  source 1..69: mol_type = other RNA
cacacagcaaagcctctttggaggctgaatggggtcccccgactctggctttcccccaggtttatatgt

SEQ ID NO: 26717 - RNA, 69 nt, synthetic construct
  source 1..69: mol_type = other RNA
cacacagcaaagcctctttggaggctgaatggggtcccccgactctggctttcccccaggtctacatgt

SEQ ID NO: 26718 - RNA, 69 nt, synthetic construct
  source 1..69: mol_type = other RNA
cacacagcaaagcctctttggaggctgaatggggtcccccgactctggctttcccccaggtatatatgt

SEQ ID NO: 26719 - RNA, 69 nt, synthetic construct
  source 1..69: mol_type = other RNA
cacacagcaaagcctctttggaggctgaatggggtcccccgactctggctttcccccaggtctatatgt

SEQ ID NO: 26720 - RNA, 69 nt, synthetic construct
  source 1..69: mol_type = other RNA
cacacagcaaagcctctttggaggctgaatggggtcccccgactctggctttcccccaggtatacatgt

SEQ ID NO: 26721 - RNA, 70 nt, synthetic construct
  source 1..70: mol_type = other RNA
gcacacagcaaagcctctttggaggctgaatggggtcccccgactctggctttcccccaggtctacatgt

SEQ ID NO: 26722 - RNA, 70 nt, synthetic construct
  source 1..70: mol_type = other RNA
gcacacagcaaagcctctttggaggctgaatggggtcccccgactctggctttcccccaggtgtatatgt

SEQ ID NO: 26723 - RNA, 70 nt, synthetic construct
  source 1..70: mol_type = other RNA
gcacacagcaaagcctctttggaggctgaatggggtcccccgactctggctttcccccaggtctatatgt

SEQ ID NO: 26724 - RNA, 70 nt, synthetic construct
  source 1..70: mol_type = other RNA
gcacacagcaaagcctctttggaggctgaatggggtcccccgactctggctttcccccaggtgtacatgt

SEQ ID NO: 26725 - RNA, 70 nt, synthetic construct
  source 1..70: mol_type = other RNA
gcacacagcaaagcctctttggaggctgaatggggtcccccgactctggctttcccccaggtatacatgt

SEQ ID NO: 26726 - RNA, 70 nt, synthetic construct
  source 1..70: mol_type = other RNA
gcacacagcaaagcctctttggaggctgaatggggtcccccgactctggctttcccccaggtttacatgt

SEQ ID NO: 26727 - RNA, 70 nt, synthetic construct
  source 1..70: mol_type = other RNA
gcacacagcaaagcctctttggaggctgaatggggtcccccgactctggctttcccccaggtatatatgt

SEQ ID NO: 26728 - RNA, 70 nt, synthetic construct
  source 1..70: mol_type = other RNA
gcacacagcaaagcctctttggaggctgaatggggtcccccgactctggctttcccccaggtttatatgt

SEQ ID NO: 26729 - RNA, 71 nt, synthetic construct
  source 1..71: mol_type = other RNA
tgcacacagcaaagcctctttggaggctgaatggggtcccccgactctggctttcccccaggtatatatgt

SEQ ID NO: 26730 - RNA, 71 nt, synthetic construct
  source 1..71: mol_type = other RNA
tgcacacagcaaagcctctttggaggctgaatggggtcccccgactctggctttcccccaggtgtacatgt

SEQ ID NO: 26731 - RNA, 71 nt, synthetic construct
  source 1..71: mol_type = other RNA
tgcacacagcaaagcctctttggaggctgaatggggtcccccgactctggctttcccccaggtctacatgt

SEQ ID NO: 26732 - RNA, 71 nt, synthetic construct
  source 1..71: mol_type = other RNA
tgcacacagcaaagcctctttggaggctgaatggggtcccccgactctggctttcccccaggtctatatgt

SEQ ID NO: 26733 - RNA, 71 nt, synthetic construct
  source 1..71: mol_type = other RNA
tgcacacagcaaagcctctttggaggctgaatggggtcccccgactctggctttcccccaggtgtatatgt

SEQ ID NO: 26734 - RNA, 71 nt, synthetic construct
  source 1..71: mol_type = other RNA
tgcacacagcaaagcctctttggaggctgaatggggtcccccgactctggctttcccccaggtttacatgt

SEQ ID NO: 26735 - RNA, 71 nt, synthetic construct
  source 1..71: mol_type = other RNA
tgcacacagcaaagcctctttggaggctgaatggggtcccccgactctggctttcccccaggtatacatgt

SEQ ID NO: 26736 - RNA, 71 nt, synthetic construct
  source 1..71: mol_type = other RNA
tgcacacagcaaagcctctttggaggctgaatggggtcccccgactctggctttcccccaggtttatatgt

SEQ ID NO: 26737 - RNA, 72 nt, synthetic construct
  source 1..72: mol_type = other RNA
gtgcacacagcaaagcctctttggaggctgaatggggtcccccgactctggctttcccccaggtttacatgt

SEQ ID NO: 26738 - RNA, 72 nt, synthetic construct
  source 1..72: mol_type = other RNA
gtgcacacagcaaagcctctttggaggctgaatggggtcccccgactctggctttcccccaggtgtatatgt

SEQ ID NO: 26739 - RNA, 72 nt, synthetic construct
  source 1..72: mol_type = other RNA
gtgcacacagcaaagcctctttggaggctgaatggggtcccccgactctggctttcccccaggtttatatgt

SEQ ID NO: 26740 - RNA, 72 nt, synthetic construct
  source 1..72: mol_type = other RNA
gtgcacacagcaaagcctctttggaggctgaatggggtcccccgactctggctttcccccaggtgtacatgt

SEQ ID NO: 26741 - RNA, 72 nt, synthetic construct
  source 1..72: mol_type = other RNA
gtgcacacagcaaagcctctttggaggctgaatggggtcccccgactctggctttcccccaggtatatatgt

SEQ ID NO: 26742 - RNA, 72 nt, synthetic construct
  source 1..72: mol_type = other RNA
gtgcacacagcaaagcctctttggaggctgaatggggtcccccgactctggctttcccccaggtctacatgt

SEQ ID NO: 26743 - RNA, 72 nt, synthetic construct
  source 1..72: mol_type = other RNA
gtgcacacagcaaagcctctttggaggctgaatggggtcccccgactctggctttcccccaggtctatatgt

SEQ ID NO: 26744 - RNA, 72 nt, synthetic construct
  source 1..72: mol_type = other RNA
gtgcacacagcaaagcctctttggaggctgaatggggtcccccgactctggctttcccccaggtatacatgt

SEQ ID NO: 26745 - RNA, 73 nt, synthetic construct
  source 1..73: mol_type = other RNA
ggtgcacacagcaaagcctctttggaggctgaatggggtcccccgactctggctttcccccaggtatacatgt

SEQ ID NO: 26746 - RNA, 73 nt, synthetic construct
  source 1..73: mol_type = other RNA
ggtgcacacagcaaagcctctttggaggctgaatggggtcccccgactctggctttcccccaggtctacatgt

SEQ ID NO: 26747 - RNA, 73 nt, synthetic construct
  source 1..73: mol_type = other RNA
ggtgcacacagcaaagcctctttggaggctgaatggggtcccccgactctggctttcccccaggtgtacatgt

SEQ ID NO: 26748 - RNA, 73 nt, synthetic construct
  source 1..73: mol_type = other RNA
ggtgcacacagcaaagcctctttggaggctgaatggggtcccccgactctggctttcccccaggtttacatgt

SEQ ID NO: 26749 - RNA, 73 nt, synthetic construct
  source 1..73: mol_type = other RNA
ggtgcacacagcaaagcctctttggaggctgaatggggtcccccgactctggctttcccccaggtttatatgt

SEQ ID NO: 26750 - RNA, 73 nt, synthetic construct
  source 1..73: mol_type = other RNA
ggtgcacacagcaaagcctctttggaggctgaatggggtcccccgactctggctttcccccaggtatatatgt

SEQ ID NO: 26751 - RNA, 73 nt, synthetic construct
  source 1..73: mol_type = other RNA
ggtgcacacagcaaagcctctttggaggctgaatggggtcccccgactctggctttcccccaggtctatatgt

SEQ ID NO: 26752 - RNA, 73 nt, synthetic construct
  source 1..73: mol_type = other RNA
ggtgcacacagcaaagcctctttggaggctgaatggggtcccccgactctggctttcccccaggtgtatatgt

SEQ ID NO: 26753 - RNA, 74 nt, synthetic construct
  source 1..74: mol_type = other RNA
gggtgcacacagcaaagcctctttggaggctgaatggggtcccccgactctggctttcccccaggtatacatgt

SEQ ID NO: 26754 - RNA, 74 nt, synthetic construct
  source 1..74: mol_type = other RNA
gggtgcacacagcaaagcctctttggaggctgaatggggtcccccgactctggctttcccccaggtctacatgt

SEQ ID NO: 26755 - RNA, 74 nt, synthetic construct
  source 1..74: mol_type = other RNA
gggtgcacacagcaaagcctctttggaggctgaatggggtcccccgactctggctttcccccaggtatatatgt

SEQ ID NO: 26756 - RNA, 74 nt, synthetic construct
  source 1..74: mol_type = other RNA
gggtgcacacagcaaagcctctttggaggctgaatggggtcccccgactctggctttcccccaggtctatatgt

SEQ ID NO: 26757 - RNA, 74 nt, synthetic construct
  source 1..74: mol_type = other RNA
gggtgcacacagcaaagcctctttggaggctgaatggggtcccccgactctggctttcccccaggtgtacatgt

SEQ ID NO: 26758 - RNA, 74 nt, synthetic construct
  source 1..74: mol_type = other RNA
gggtgcacacagcaaagcctctttggaggctgaatggggtcccccgactctggctttcccccaggtgtatatgt

SEQ ID NO: 26759 - RNA, 74 nt, synthetic construct
  source 1..74: mol_type = other RNA
gggtgcacacagcaaagcctctttggaggctgaatggggtcccccgactctggctttcccccaggtttacatgt

SEQ ID NO: 26760 - RNA, 74 nt, synthetic construct
  source 1..74: mol_type = other RNA
gggtgcacacagcaaagcctctttggaggctgaatggggtcccccgactctggctttcccccaggtttatatgt

SEQ ID NO: 26761 - RNA, 75 nt, synthetic construct
  source 1..75: mol_type = other RNA
tgggtgcacacagcaaagcctctttggaggctgaatggggtcccccgactctggctttcccccaggtgtacatgt

SEQ ID NO: 26762 - RNA, 75 nt, synthetic construct
  source 1..75: mol_type = other RNA
tgggtgcacacagcaaagcctctttggaggctgaatggggtcccccgactctggctttcccccaggtttacatgt

SEQ ID NO: 26763 - RNA, 75 nt, synthetic construct
  source 1..75: mol_type = other RNA
tgggtgcacacagcaaagcctctttggaggctgaatggggtcccccgactctggctttcccccaggtttatatgt

SEQ ID NO: 26764 - RNA, 75 nt, synthetic construct
  source 1..75: mol_type = other RNA
tgggtgcacacagcaaagcctctttggaggctgaatggggtcccccgactctggctttcccccaggtgtatatgt

SEQ ID NO: 26765 - RNA, 75 nt, synthetic construct
  source 1..75: mol_type = other RNA
tgggtgcacacagcaaagcctctttggaggctgaatggggtcccccgactctggctttcccccaggtatacatgt

SEQ ID NO: 26766 - RNA, 75 nt, synthetic construct
  source 1..75: mol_type = other RNA
tgggtgcacacagcaaagcctctttggaggctgaatggggtcccccgactctggctttcccccaggtatatatgt

SEQ ID NO: 26767 - RNA, 75 nt, synthetic construct
  source 1..75: mol_type = other RNA
tgggtgcacacagcaaagcctctttggaggctgaatggggtcccccgactctggctttcccccaggtctacatgt

SEQ ID NO: 26768 - RNA, 75 nt, synthetic construct
  source 1..75: mol_type = other RNA
tgggtgcacacagcaaagcctctttggaggctgaatggggtcccccgactctggctttcccccaggtctatatgt

SEQ ID NO: 26769 - RNA, 76 nt, synthetic construct
  source 1..76: mol_type = other RNA
ctgggtgcacacagcaaagcctctttggaggctgaatggggtcccccgactctggctttcccccaggtttacatgt

SEQ ID NO: 26770 - RNA, 76 nt, synthetic construct
  source 1..76: mol_type = other RNA
ctgggtgcacacagcaaagcctctttggaggctgaatggggtcccccgactctggctttcccccaggtttatatgt

SEQ ID NO: 26771 - RNA, 76 nt, synthetic construct
  source 1..76: mol_type = other RNA
ctgggtgcacacagcaaagcctctttggaggctgaatggggtcccccgactctggctttcccccaggtgtacatgt

SEQ ID NO: 26772 - RNA, 76 nt, synthetic construct
  source 1..76: mol_type = other RNA
ctgggtgcacacagcaaagcctctttggaggctgaatggggtcccccgactctggctttcccccaggtatatatgt

SEQ ID NO: 26773 - RNA, 76 nt, synthetic construct
  source 1..76: mol_type = other RNA
ctgggtgcacacagcaaagcctctttggaggctgaatggggtcccccgactctggctttcccccaggtctatatgt

SEQ ID NO: 26774 - RNA, 76 nt, synthetic construct
  source 1..76: mol_type = other RNA
ctgggtgcacacagcaaagcctctttggaggctgaatggggtcccccgactctggctttcccccaggtctacatgt

SEQ ID NO: 26775 - RNA, 76 nt, synthetic construct
  source 1..76: mol_type = other RNA
ctgggtgcacacagcaaagcctctttggaggctgaatggggtcccccgactctggctttcccccaggtatacatgt

SEQ ID NO: 26776 - RNA, 76 nt, synthetic construct
  source 1..76: mol_type = other RNA
ctgggtgcacacagcaaagcctctttggaggctgaatggggtcccccgactctggctttcccccaggtgtatatgt

SEQ ID NO: 26777 - RNA, 77 nt, synthetic construct
  source 1..77: mol_type = other RNA
cctgggtgcacacagcaaagcctctttggaggctgaatggggtcccccgactctggctttcccccaggtatacatgt

SEQ ID NO: 26778 - RNA, 77 nt, synthetic construct
  source 1..77: mol_type = other RNA
cctgggtgcacacagcaaagcctctttggaggctgaatggggtcccccgactctggctttcccccaggtttatatgt

SEQ ID NO: 26779 - RNA, 77 nt, synthetic construct
  source 1..77: mol_type = other RNA
cctgggtgcacacagcaaagcctctttggaggctgaatggggtcccccgactctggctttcccccaggtttacatgt

SEQ ID NO: 26780 - RNA, 77 nt, synthetic construct
  source 1..77: mol_type = other RNA
cctgggtgcacacagcaaagcctctttggaggctgaatggggtcccccgactctggctttcccccaggtgtacatgt

SEQ ID NO: 26781 - RNA, 77 nt, synthetic construct
  source 1..77: mol_type = other RNA
cctgggtgcacacagcaaagcctctttggaggctgaatggggtcccccgactctggctttcccccaggtctatatgt

SEQ ID NO: 26782 - RNA, 77 nt, synthetic construct
  source 1..77: mol_type = other RNA
cctgggtgcacacagcaaagcctctttggaggctgaatggggtcccccgactctggctttcccccaggtgtatatgt

SEQ ID NO: 26783 - RNA, 77 nt, synthetic construct
  source 1..77: mol_type = other RNA
cctgggtgcacacagcaaagcctctttggaggctgaatggggtcccccgactctggctttcccccaggtatatatgt

SEQ ID NO: 26784 - RNA, 77 nt, synthetic construct
  source 1..77: mol_type = other RNA
cctgggtgcacacagcaaagcctctttggaggctgaatggggtcccccgactctggctttcccccaggtctacatgt

SEQ ID NO: 26785 - RNA, 78 nt, synthetic construct
  source 1..78: mol_type = other RNA
tcctgggtgcacacagcaaagcctctttggaggctgaatggggtcccccgactctggctttcccccaggtttatatgt

SEQ ID NO: 26786 - RNA, 78 nt, synthetic construct
  source 1..78: mol_type = other RNA
tcctgggtgcacacagcaaagcctctttggaggctgaatggggtcccccgactctggctttcccccaggtgtatatgt

SEQ ID NO: 26787 - RNA, 78 nt, synthetic construct
  source 1..78: mol_type = other RNA
tcctgggtgcacacagcaaagcctctttggaggctgaatggggtcccccgactctggctttcccccaggtgtacatgt

SEQ ID NO: 26788 - RNA, 78 nt, synthetic construct
  source 1..78: mol_type = other RNA
tcctgggtgcacacagcaaagcctctttggaggctgaatggggtcccccgactctggctttcccccaggtatatatgt

SEQ ID NO: 26789 - RNA, 78 nt, synthetic construct
  source 1..78: mol_type = other RNA
tcctgggtgcacacagcaaagcctctttggaggctgaatggggtcccccgactctggctttcccccaggtctatatgt

SEQ ID NO: 26790 - RNA, 78 nt, synthetic construct
  source 1..78: mol_type = other RNA
tcctgggtgcacacagcaaagcctctttggaggctgaatggggtcccccgactctggctttcccccaggtctacatgt

SEQ ID NO: 26791 - RNA, 78 nt, synthetic construct
  source 1..78: mol_type = other RNA
tcctgggtgcacacagcaaagcctctttggaggctgaatggggtcccccgactctggctttcccccaggtatacatgt

SEQ ID NO: 26792 - RNA, 78 nt, synthetic construct
  source 1..78: mol_type = other RNA
tcctgggtgcacacagcaaagcctctttggaggctgaatggggtcccccgactctggctttcccccaggtttacatgt

SEQ ID NO: 26793 - RNA, 79 nt, synthetic construct
  source 1..79: mol_type = other RNA
atcctgggtgcacacagcaaagcctctttggaggctgaatggggtcccccgactctggctttcccccaggtgtacatgt

SEQ ID NO: 26794 - RNA, 79 nt, synthetic construct
  source 1..79: mol_type = other RNA
atcctgggtgcacacagcaaagcctctttggaggctgaatggggtcccccgactctggctttcccccaggtttatatgt

SEQ ID NO: 26795 - RNA, 79 nt, synthetic construct
  source 1..79: mol_type = other RNA
atcctgggtgcacacagcaaagcctctttggaggctgaatggggtcccccgactctggctttcccccaggtttacatgt

SEQ ID NO: 26796 - RNA, 79 nt, synthetic construct
  source 1..79: mol_type = other RNA
atcctgggtgcacacagcaaagcctctttggaggctgaatggggtcccccgactctggctttcccccaggtgtatatgt

SEQ ID NO: 26797 - RNA, 79 nt, synthetic construct
  source 1..79: mol_type = other RNA
atcctgggtgcacacagcaaagcctctttggaggctgaatggggtcccccgactctggctttcccccaggtatatatgt

SEQ ID NO: 26798 - RNA, 79 nt, synthetic construct
  source 1..79: mol_type = other RNA
atcctgggtgcacacagcaaagcctctttggaggctgaatggggtcccccgactctggctttcccccaggtatacatgt

SEQ ID NO: 26799 - RNA, 79 nt, synthetic construct
  source 1..79: mol_type = other RNA
atcctgggtgcacacagcaaagcctctttggaggctgaatggggtcccccgactctggctttcccccaggtctatatgt

SEQ ID NO: 26800 - RNA, 79 nt, synthetic construct
  source 1..79: mol_type = other RNA
atcctgggtgcacacagcaaagcctctttggaggctgaatggggtcccccgactctggctttcccccaggtctacatgt

SEQ ID NO: 26801 - RNA, 80 nt, synthetic construct
  source 1..80: mol_type = other RNA
gatcctgggtgcacacagcaaagcctctttggaggctgaatggggtcccccgactctggctttcccccaggtttatatgt

SEQ ID NO: 26802 - RNA, 80 nt, synthetic construct
  source 1..80: mol_type = other RNA
gatcctgggtgcacacagcaaagcctctttggaggctgaatggggtcccccgactctggctttcccccaggtttacatgt

SEQ ID NO: 26803 - RNA, 80 nt, synthetic construct
  source 1..80: mol_type = other RNA
gatcctgggtgcacacagcaaagcctctttggaggctgaatggggtcccccgactctggctttcccccaggtgtatatgt

SEQ ID NO: 26804 - RNA, 80 nt, synthetic construct
  source 1..80: mol_type = other RNA
gatcctgggtgcacacagcaaagcctctttggaggctgaatggggtcccccgactctggctttcccccaggtgtacatgt

SEQ ID NO: 26805 - RNA, 80 nt, synthetic construct
  source 1..80: mol_type = other RNA
gatcctgggtgcacacagcaaagcctctttggaggctgaatggggtcccccgactctggctttcccccaggtctacatgt

SEQ ID NO: 26806 - RNA, 80 nt, synthetic construct
  source 1..80: mol_type = other RNA
gatcctgggtgcacacagcaaagcctctttggaggctgaatggggtcccccgactctggctttcccccaggtatatatgt

SEQ ID NO: 26807 - RNA, 80 nt, synthetic construct
  source 1..80: mol_type = other RNA
gatcctgggtgcacacagcaaagcctctttggaggctgaatggggtcccccgactctggctttcccccaggtatacatgt

SEQ ID NO: 26808 - RNA, 80 nt, synthetic construct
  source 1..80: mol_type = other RNA
gatcctgggtgcacacagcaaagcctctttggaggctgaatggggtcccccgactctggctttcccccaggtctatatgt

SEQ ID NO: 26809 - RNA, 81 nt, synthetic construct
  source 1..81: mol_type = other RNA
ggatcctgggtgcacacagcaaagcctctttggaggctgaatggggtcccccgactctggctttcccccaggtctacatgt

SEQ ID NO: 26810 - RNA, 81 nt, synthetic construct
  source 1..81: mol_type = other RNA
ggatcctgggtgcacacagcaaagcctctttggaggctgaatggggtcccccgactctggctttcccccaggtttacatgt

SEQ ID NO: 26811 - RNA, 81 nt, synthetic construct
  source 1..81: mol_type = other RNA
ggatcctgggtgcacacagcaaagcctctttggaggctgaatggggtcccccgactctggctttcccccaggtttatatgt

SEQ ID NO: 26812 - RNA, 81 nt, synthetic construct
  source 1..81: mol_type = other RNA
ggatcctgggtgcacacagcaaagcctctttggaggctgaatggggtcccccgactctggctttcccccaggtgtacatgt

SEQ ID NO: 26813 - RNA, 81 nt, synthetic construct
  source 1..81: mol_type = other RNA
ggatcctgggtgcacacagcaaagcctctttggaggctgaatggggtcccccgactctggctttcccccaggtctatatgt

SEQ ID NO: 26814 - RNA, 81 nt, synthetic construct
  source 1..81: mol_type = other RNA
ggatcctgggtgcacacagcaaagcctctttggaggctgaatggggtcccccgactctggctttcccccaggtgtatatgt

SEQ ID NO: 26815 - RNA, 81 nt, synthetic construct
  source 1..81: mol_type = other RNA
ggatcctgggtgcacacagcaaagcctctttggaggctgaatggggtcccccgactctggctttcccccaggtatatatgt

SEQ ID NO: 26816 - RNA, 81 nt, synthetic construct
  source 1..81: mol_type = other RNA
ggatcctgggtgcacacagcaaagcctctttggaggctgaatggggtcccccgactctggctttcccccaggtatacatgt

SEQ ID NO: 26817 - RNA, 82 nt, synthetic construct
  source 1..82: mol_type = other RNA
gggatcctgggtgcacacagcaaagcctctttggaggctgaatggggtcccccgactctggctttcccccaggtctatatgt

SEQ ID NO: 26818 - RNA, 82 nt, synthetic construct
  source 1..82: mol_type = other RNA
gggatcctgggtgcacacagcaaagcctctttggaggctgaatggggtcccccgactctggctttcccccaggtgtatatgt

SEQ ID NO: 26819 - RNA, 82 nt, synthetic construct
  source 1..82: mol_type = other RNA
gggatcctgggtgcacacagcaaagcctctttggaggctgaatggggtcccccgactctggctttcccccaggtatatatgt

SEQ ID NO: 26820 - RNA, 82 nt, synthetic construct
  source 1..82: mol_type = other RNA
gggatcctgggtgcacacagcaaagcctctttggaggctgaatggggtcccccgactctggctttcccccaggtatacatgt

SEQ ID NO: 26821 - RNA, 82 nt, synthetic construct
  source 1..82: mol_type = other RNA
gggatcctgggtgcacacagcaaagcctctttggaggctgaatggggtcccccgactctggctttcccccaggtctacatgt

SEQ ID NO: 26822 - RNA, 82 nt, synthetic construct
  source 1..82: mol_type = other RNA
gggatcctgggtgcacacagcaaagcctctttggaggctgaatggggtcccccgactctggctttcccccaggtgtacatgt

SEQ ID NO: 26823 - RNA, 82 nt, synthetic construct
  source 1..82: mol_type = other RNA
gggatcctgggtgcacacagcaaagcctctttggaggctgaatggggtcccccgactctggctttcccccaggtttacatgt

SEQ ID NO: 26824 - RNA, 82 nt, synthetic construct
  source 1..82: mol_type = other RNA
gggatcctgggtgcacacagcaaagcctctttggaggctgaatggggtcccccgactctggctttcccccaggtttatatgt

SEQ ID NO: 26825 - RNA, 83 nt, synthetic construct
  source 1..83: mol_type = other RNA
tgggatcctgggtgcacacagcaaagcctctttggaggctgaatggggtcccccgactctggctttcccccaggtgtacatgt

SEQ ID NO: 26826 - RNA, 83 nt, synthetic construct
  source 1..83: mol_type = other RNA
tgggatcctgggtgcacacagcaaagcctctttggaggctgaatggggtcccccgactctggctttcccccaggtttatatgt

SEQ ID NO: 26827 - RNA, 83 nt, synthetic construct
  source 1..83: mol_type = other RNA
tgggatcctgggtgcacacagcaaagcctctttggaggctgaatggggtcccccgactctggctttcccccaggtgtatatgt

SEQ ID NO: 26828 - RNA, 83 nt, synthetic construct
  source 1..83: mol_type = other RNA
tgggatcctgggtgcacacagcaaagcctctttggaggctgaatggggtcccccgactctggctttcccccaggtatacatgt

SEQ ID NO: 26829 - RNA, 83 nt, synthetic construct
  source 1..83: mol_type = other RNA
tgggatcctgggtgcacacagcaaagcctctttggaggctgaatggggtcccccgactctggctttcccccaggtatatatgt

SEQ ID NO: 26830 - RNA, 83 nt, synthetic construct
  source 1..83: mol_type = other RNA
tgggatcctgggtgcacacagcaaagcctctttggaggctgaatggggtcccccgactctggctttcccccaggtctacatgt

SEQ ID NO: 26831 - RNA, 83 nt, synthetic construct
  source 1..83: mol_type = other RNA
tgggatcctgggtgcacacagcaaagcctctttggaggctgaatggggtcccccgactctggctttcccccaggtctatatgt

SEQ ID NO: 26832 - RNA, 83 nt, synthetic construct
  source 1..83: mol_type = other RNA
tgggatcctgggtgcacacagcaaagcctctttggaggctgaatggggtcccccgactctggctttcccccaggtttacatgt

SEQ ID NO: 26833 - RNA, 84 nt, synthetic construct
  source 1..84: mol_type = other RNA
gtgggatcctgggtgcacacagcaaagcctctttggaggctgaatggggtcccccgactctggctttcccccaggtatatatgt

SEQ ID NO: 26834 - RNA, 84 nt, synthetic construct
  source 1..84: mol_type = other RNA
gtgggatcctgggtgcacacagcaaagcctctttggaggctgaatggggtcccccgactctggctttcccccaggtgtatatgt

SEQ ID NO: 26835 - RNA, 84 nt, synthetic construct
  source 1..84: mol_type = other RNA
gtgggatcctgggtgcacacagcaaagcctctttggaggctgaatggggtcccccgactctggctttcccccaggtttacatgt

SEQ ID NO: 26836 - RNA, 84 nt, synthetic construct
  source 1..84: mol_type = other RNA
gtgggatcctgggtgcacacagcaaagcctctttggaggctgaatggggtcccccgactctggctttcccccaggtttatatgt

SEQ ID NO: 26837 - RNA, 84 nt, synthetic construct
  source 1..84: mol_type = other RNA
gtgggatcctgggtgcacacagcaaagcctctttggaggctgaatggggtcccccgactctggctttcccccaggtgtacatgt

SEQ ID NO: 26838 - RNA, 84 nt, synthetic construct
  source 1..84: mol_type = other RNA
gtgggatcctgggtgcacacagcaaagcctctttggaggctgaatggggtcccccgactctggctttcccccaggtatacatgt

SEQ ID NO: 26839 - RNA, 84 nt, synthetic construct
  source 1..84: mol_type = other RNA
gtgggatcctgggtgcacacagcaaagcctctttggaggctgaatggggtcccccgactctggctttcccccaggtctacatgt

SEQ ID NO: 26840 - RNA, 84 nt, synthetic construct
  source 1..84: mol_type = other RNA
gtgggatcctgggtgcacacagcaaagcctctttggaggctgaatggggtcccccgactctggctttcccccaggtctatatgt

SEQ ID NO: 26841 - RNA, 85 nt, synthetic construct
  source 1..85: mol_type = other RNA
agtgggatcctgggtgcacacagcaaagcctctttggaggctgaatggggtcccccgactctggctttcccccaggtttacatgt

SEQ ID NO: 26842 - RNA, 85 nt, synthetic construct
  source 1..85: mol_type = other RNA
agtgggatcctgggtgcacacagcaaagcctctttggaggctgaatggggtcccccgactctggctttcccccaggtatacatgt

SEQ ID NO: 26843 - RNA, 85 nt, synthetic construct
  source 1..85: mol_type = other RNA
agtgggatcctgggtgcacacagcaaagcctctttggaggctgaatggggtcccccgactctggctttcccccaggtttatatgt

SEQ ID NO: 26844 - RNA, 85 nt, synthetic construct
  source 1..85: mol_type = other RNA
agtgggatcctgggtgcacacagcaaagcctctttggaggctgaatggggtcccccgactctggctttcccccaggtgtatatgt

SEQ ID NO: 26845 - RNA, 85 nt, synthetic construct
  source 1..85: mol_type = other RNA
agtgggatcctgggtgcacacagcaaagcctctttggaggctgaatggggtcccccgactctggctttcccccaggtgtacatgt

SEQ ID NO: 26846 - RNA, 85 nt, synthetic construct
  source 1..85: mol_type = other RNA
agtgggatcctgggtgcacacagcaaagcctctttggaggctgaatggggtcccccgactctggctttcccccaggtctacatgt

SEQ ID NO: 26847 - RNA, 85 nt, synthetic construct
  source 1..85: mol_type = other RNA
agtgggatcctgggtgcacacagcaaagcctctttggaggctgaatggggtcccccgactctggctttcccccaggtatatatgt

SEQ ID NO: 26848 - RNA, 85 nt, synthetic construct
  source 1..85: mol_type = other RNA
agtgggatcctgggtgcacacagcaaagcctctttggaggctgaatggggtcccccgactctggctttcccccaggtctatatgt

SEQ ID NO: 26849 - RNA, 86 nt, synthetic construct
  source 1..86: mol_type = other RNA
tagtgggatcctgggtgcacacagcaaagcctctttggaggctgaatggggtcccccgactctggctttcccccaggtgtacatgt

SEQ ID NO: 26850 - RNA, 86 nt, synthetic construct
  source 1..86: mol_type = other RNA
tagtgggatcctgggtgcacacagcaaagcctctttggaggctgaatggggtcccccgactctggctttcccccaggtatacatgt

SEQ ID NO: 26851 - RNA, 86 nt, synthetic construct
  source 1..86: mol_type = other RNA
tagtgggatcctgggtgcacacagcaaagcctctttggaggctgaatggggtcccccgactctggctttcccccaggtatatatgt

SEQ ID NO: 26852 - RNA, 86 nt, synthetic construct
  source 1..86: mol_type = other RNA
tagtgggatcctgggtgcacacagcaaagcctctttggaggctgaatggggtcccccgactctggctttcccccaggtctacatgt

SEQ ID NO: 26853 - RNA, 86 nt, synthetic construct
  source 1..86: mol_type = other RNA
tagtgggatcctgggtgcacacagcaaagcctctttggaggctgaatggggtcccccgactctggctttcccccaggtctatatgt

SEQ ID NO: 26854 - RNA, 86 nt, synthetic construct
  source 1..86: mol_type = other RNA
tagtgggatcctgggtgcacacagcaaagcctctttggaggctgaatggggtcccccgactctggctttcccccaggtgtatatgt

SEQ ID NO: 26855 - RNA, 86 nt, synthetic construct
  source 1..86: mol_type = other RNA
tagtgggatcctgggtgcacacagcaaagcctctttggaggctgaatggggtcccccgactctggctttcccccaggtttacatgt

SEQ ID NO: 26856 - RNA, 86 nt, synthetic construct
  source 1..86: mol_type = other RNA
tagtgggatcctgggtgcacacagcaaagcctctttggaggctgaatggggtcccccgactctggctttcccccaggtttatatgt

SEQ ID NO: 26857 - RNA, 87 nt, synthetic construct
  source 1..87: mol_type = other RNA
gtagtgggatcctgggtgcacacagcaaagcctctttggaggctgaatggggtcccccgactctggctttcccccaggtgtatatgt

SEQ ID NO: 26858 - RNA, 87 nt, synthetic construct
  source 1..87: mol_type = other RNA
gtagtgggatcctgggtgcacacagcaaagcctctttggaggctgaatggggtcccccgactctggctttcccccaggtttacatgt

SEQ ID NO: 26859 - RNA, 87 nt, synthetic construct
  source 1..87: mol_type = other RNA
gtagtgggatcctgggtgcacacagcaaagcctctttggaggctgaatggggtcccccgactctggctttcccccaggtttatatgt

SEQ ID NO: 26860 - RNA, 87 nt, synthetic construct
  source 1..87: mol_type = other RNA
gtagtgggatcctgggtgcacacagcaaagcctctttggaggctgaatggggtcccccgactctggctttcccccaggtctatatgt

SEQ ID NO: 26861 - RNA, 87 nt, synthetic construct
  source 1..87: mol_type = other RNA
gtagtgggatcctgggtgcacacagcaaagcctctttggaggctgaatggggtcccccgactctggctttcccccaggtctacatgt

SEQ ID NO: 26862 - RNA, 87 nt, synthetic construct
  source 1..87: mol_type = other RNA
gtagtgggatcctgggtgcacacagcaaagcctctttggaggctgaatggggtcccccgactctggctttcccccaggtatatatgt

SEQ ID NO: 26863 - RNA, 87 nt, synthetic construct
  source 1..87: mol_type = other RNA
gtagtgggatcctgggtgcacacagcaaagcctctttggaggctgaatggggtcccccgactctggctttcccccaggtgtacatgt

SEQ ID NO: 26864 - RNA, 87 nt, synthetic construct
  source 1..87: mol_type = other RNA
gtagtgggatcctgggtgcacacagcaaagcctctttggaggctgaatggggtcccccgactctggctttcccccaggtatacatgt

SEQ ID NO: 26865 - RNA, 88 nt, synthetic construct
  source 1..88: mol_type = other RNA
ggtagtgggatcctgggtgcacacagcaaagcctctttggaggctgaatggggtcccccgactctggctttcccccaggtgtatatgt

SEQ ID NO: 26866 - RNA, 88 nt, synthetic construct
  source 1..88: mol_type = other RNA
ggtagtgggatcctgggtgcacacagcaaagcctctttggaggctgaatggggtcccccgactctggctttcccccaggtttacatgt

SEQ ID NO: 26867 - RNA, 88 nt, synthetic construct
  source 1..88: mol_type = other RNA
ggtagtgggatcctgggtgcacacagcaaagcctctttggaggctgaatggggtcccccgactctggctttcccccaggtttatatgt

SEQ ID NO: 26868 - RNA, 88 nt, synthetic construct
  source 1..88: mol_type = other RNA
ggtagtgggatcctgggtgcacacagcaaagcctctttggaggctgaatggggtcccccgactctggctttcccccaggtatatatgt

SEQ ID NO: 26869 - RNA, 88 nt, synthetic construct
  source 1..88: mol_type = other RNA
ggtagtgggatcctgggtgcacacagcaaagcctctttggaggctgaatggggtcccccgactctggctttcccccaggtctatatgt

SEQ ID NO: 26870 - RNA, 88 nt, synthetic construct
  source 1..88: mol_type = other RNA
ggtagtgggatcctgggtgcacacagcaaagcctctttggaggctgaatggggtcccccgactctggctttcccccaggtctacatgt

SEQ ID NO: 26871 - RNA, 88 nt, synthetic construct
  source 1..88: mol_type = other RNA
ggtagtgggatcctgggtgcacacagcaaagcctctttggaggctgaatggggtcccccgactctggctttcccccaggtgtacatgt

SEQ ID NO: 26872 - RNA, 88 nt, synthetic construct
  source 1..88: mol_type = other RNA
ggtagtgggatcctgggtgcacacagcaaagcctctttggaggctgaatggggtcccccgactctggctttcccccaggtatacatgt

SEQ ID NO: 26873 - RNA, 89 nt, synthetic construct
  source 1..89: mol_type = other RNA
gggtagtgggatcctgggtgcacacagcaaagcctctttggaggctgaatggggtcccccgactctggctttcccccaggtatacatgt

SEQ ID NO: 26874 - RNA, 89 nt, synthetic construct
  source 1..89: mol_type = other RNA
gggtagtgggatcctgggtgcacacagcaaagcctctttggaggctgaatggggtcccccgactctggctttcccccaggtttatatgt

SEQ ID NO: 26875 - RNA, 89 nt, synthetic construct
  source 1..89: mol_type = other RNA
gggtagtgggatcctgggtgcacacagcaaagcctctttggaggctgaatggggtcccccgactctggctttcccccaggtgtatatgt

SEQ ID NO: 26876 - RNA, 89 nt, synthetic construct
  source 1..89: mol_type = other RNA
gggtagtgggatcctgggtgcacacagcaaagcctctttggaggctgaatggggtcccccgactctggctttcccccaggtgtacatgt

SEQ ID NO: 26877 - RNA, 89 nt, synthetic construct
  source 1..89: mol_type = other RNA
gggtagtgggatcctgggtgcacacagcaaagcctctttggaggctgaatggggtcccccgactctggctttcccccaggtttacatgt

SEQ ID NO: 26878 - RNA, 89 nt, synthetic construct
  source 1..89: mol_type = other RNA
gggtagtgggatcctgggtgcacacagcaaagcctctttggaggctgaatggggtcccccgactctggctttcccccaggtctacatgt

SEQ ID NO: 26879 - RNA, 89 nt, synthetic construct
  source 1..89: mol_type = other RNA
gggtagtgggatcctgggtgcacacagcaaagcctctttggaggctgaatggggtcccccgactctggctttcccccaggtatatatgt

SEQ ID NO: 26880 - RNA, 89 nt, synthetic construct
  source 1..89: mol_type = other RNA
gggtagtgggatcctgggtgcacacagcaaagcctctttggaggctgaatggggtcccccgactctggctttcccccaggtctatatgt

SEQ ID NO: 26881 - RNA, 90 nt, synthetic construct
  source 1..90: mol_type = other RNA
tgggtagtgggatcctgggtgcacacagcaaagcctctttggaggctgaatggggtcccccgactctggctttcccccaggtttatatgt

SEQ ID NO: 26882 - RNA, 90 nt, synthetic construct
  source 1..90: mol_type = other RNA
tgggtagtgggatcctgggtgcacacagcaaagcctctttggaggctgaatggggtcccccgactctggctttcccccaggtatacatgt

SEQ ID NO: 26883 - RNA, 90 nt, synthetic construct
  source 1..90: mol_type = other RNA
tgggtagtgggatcctgggtgcacacagcaaagcctctttggaggctgaatggggtcccccgactctggctttcccccaggtatatatgt

SEQ ID NO: 26884 - RNA, 90 nt, synthetic construct
  source 1..90: mol_type = other RNA
tgggtagtgggatcctgggtgcacacagcaaagcctctttggaggctgaatggggtcccccgactctggctttcccccaggtgtatatgt

SEQ ID NO: 26885 - RNA, 90 nt, synthetic construct
  source 1..90: mol_type = other RNA
tgggtagtgggatcctgggtgcacacagcaaagcctctttggaggctgaatggggtcccccgactctggctttcccccaggtgtacatgt

SEQ ID NO: 26886 - RNA, 90 nt, synthetic construct
  source 1..90: mol_type = other RNA
tgggtagtgggatcctgggtgcacacagcaaagcctctttggaggctgaatggggtcccccgactctggctttcccccaggtctatatgt

SEQ ID NO: 26887 - RNA, 90 nt, synthetic construct
  source 1..90: mol_type = other RNA
tgggtagtgggatcctgggtgcacacagcaaagcctctttggaggctgaatggggtcccccgactctggctttcccccaggtctacatgt

SEQ ID NO: 26888 - RNA, 90 nt, synthetic construct
  source 1..90: mol_type = other RNA
tgggtagtgggatcctgggtgcacacagcaaagcctctttggaggctgaatggggtcccccgactctggctttcccccaggtttacatgt

SEQ ID NO: 26889 - RNA, 91 nt, synthetic construct
  source 1..91: mol_type = other RNA
gtgggtagtgggatcctgggtgcacacagcaaagcctctttggaggctgaatggggtcccccgactctggctttcccccaggtttatatgt

SEQ ID NO: 26890 - RNA, 91 nt, synthetic construct
  source 1..91: mol_type = other RNA
gtgggtagtgggatcctgggtgcacacagcaaagcctctttggaggctgaatggggtcccccgactctggctttcccccaggtttacatgt

SEQ ID NO: 26891 - RNA, 91 nt, synthetic construct
  source 1..91: mol_type = other RNA
gtgggtagtgggatcctgggtgcacacagcaaagcctctttggaggctgaatggggtcccccgactctggctttcccccaggtatacatgt

SEQ ID NO: 26892 - RNA, 91 nt, synthetic construct
  source 1..91: mol_type = other RNA
gtgggtagtgggatcctgggtgcacacagcaaagcctctttggaggctgaatggggtcccccgactctggctttcccccaggtgtacatgt

SEQ ID NO: 26893 - RNA, 91 nt, synthetic construct
  source 1..91: mol_type = other RNA
gtgggtagtgggatcctgggtgcacacagcaaagcctctttggaggctgaatggggtcccccgactctggctttcccccaggtctatatgt

SEQ ID NO: 26894 - RNA, 91 nt, synthetic construct
  source 1..91: mol_type = other RNA
gtgggtagtgggatcctgggtgcacacagcaaagcctctttggaggctgaatggggtcccccgactctggctttcccccaggtatatatgt

SEQ ID NO: 26895 - RNA, 91 nt, synthetic construct
  source 1..91: mol_type = other RNA
gtgggtagtgggatcctgggtgcacacagcaaagcctctttggaggctgaatggggtcccccgactctggctttcccccaggtctacatgt

SEQ ID NO: 26896 - RNA, 91 nt, synthetic construct
  source 1..91: mol_type = other RNA
gtgggtagtgggatcctgggtgcacacagcaaagcctctttggaggctgaatggggtcccccgactctggctttcccccaggtgtatatgt

SEQ ID NO: 26897 - RNA, 92 nt, synthetic construct
  source 1..92: mol_type = other RNA
agtgggtagtgggatcctgggtgcacacagcaaagcctctttggaggctgaatggggtcccccgactctggctttcccccaggtatacatgt

SEQ ID NO: 26898 - RNA, 92 nt, synthetic construct
  source 1..92: mol_type = other RNA
agtgggtagtgggatcctgggtgcacacagcaaagcctctttggaggctgaatggggtcccccgactctggctttcccccaggtctacatgt

SEQ ID NO: 26899 - RNA, 92 nt, synthetic construct
  source 1..92: mol_type = other RNA
agtgggtagtgggatcctgggtgcacacagcaaagcctctttggaggctgaatggggtcccccgactctggctttcccccaggtctatatgt

SEQ ID NO: 26900 - RNA, 92 nt, synthetic construct
  source 1..92: mol_type = other RNA
agtgggtagtgggatcctgggtgcacacagcaaagcctctttggaggctgaatggggtcccccgactctggctttcccccaggtttatatgt

SEQ ID NO: 26901 - RNA, 92 nt, synthetic construct
  source 1..92: mol_type = other RNA
agtgggtagtgggatcctgggtgcacacagcaaagcctctttggaggctgaatggggtcccccgactctggctttcccccaggtgtatatgt

SEQ ID NO: 26902 - RNA, 92 nt, synthetic construct
  source 1..92: mol_type = other RNA
agtgggtagtgggatcctgggtgcacacagcaaagcctctttggaggctgaatggggtcccccgactctggctttcccccaggtttacatgt

SEQ ID NO: 26903 - RNA, 92 nt, synthetic construct
  source 1..92: mol_type = other RNA
agtgggtagtgggatcctgggtgcacacagcaaagcctctttggaggctgaatggggtcccccgactctggctttcccccaggtatatatgt

SEQ ID NO: 26904 - RNA, 92 nt, synthetic construct
  source 1..92: mol_type = other RNA
agtgggtagtgggatcctgggtgcacacagcaaagcctctttggaggctgaatggggtcccccgactctggctttcccccaggtgtacatgt

SEQ ID NO: 26905 - RNA, 93 nt, synthetic construct
  source 1..93: mol_type = other RNA
cagtgggtagtgggatcctgggtgcacacagcaaagcctctttggaggctgaatggggtcccccgactctggctttcccccaggtttatatgt

SEQ ID NO: 26906 - RNA, 93 nt, synthetic construct
  source 1..93: mol_type = other RNA
cagtgggtagtgggatcctgggtgcacacagcaaagcctctttggaggctgaatggggtcccccgactctggctttcccccaggtttacatgt

SEQ ID NO: 26907 - RNA, 93 nt, synthetic construct
  source 1..93: mol_type = other RNA
cagtgggtagtgggatcctgggtgcacacagcaaagcctctttggaggctgaatggggtcccccgactctggctttcccccaggtgtatatgt

SEQ ID NO: 26908 - RNA, 93 nt, synthetic construct
  source 1..93: mol_type = other RNA
cagtgggtagtgggatcctgggtgcacacagcaaagcctctttggaggctgaatggggtcccccgactctggctttcccccaggtctatatgt

SEQ ID NO: 26909 - RNA, 93 nt, synthetic construct
  source 1..93: mol_type = other RNA
cagtgggtagtgggatcctgggtgcacacagcaaagcctctttggaggctgaatggggtcccccgactctggctttcccccaggtctacatgt

SEQ ID NO: 26910 - RNA, 93 nt, synthetic construct
  source 1..93: mol_type = other RNA
cagtgggtagtgggatcctgggtgcacacagcaaagcctctttggaggctgaatggggtcccccgactctggctttcccccaggtatacatgt

SEQ ID NO: 26911 - RNA, 93 nt, synthetic construct
  source 1..93: mol_type = other RNA
cagtgggtagtgggatcctgggtgcacacagcaaagcctctttggaggctgaatggggtcccccgactctggctttcccccaggtatatatgt

SEQ ID NO: 26912 - RNA, 93 nt, synthetic construct
  source 1..93: mol_type = other RNA
cagtgggtagtgggatcctgggtgcacacagcaaagcctctttggaggctgaatggggtcccccgactctggctttcccccaggtgtacatgt

SEQ ID NO: 26913 - RNA, 94 nt, synthetic construct
  source 1..94: mol_type = other RNA
ccagtgggtagtgggatcctgggtgcacacagcaaagcctctttggaggctgaatggggtcccccgactctggctttcccccaggtgtacatgt

SEQ ID NO: 26914 - RNA, 94 nt, synthetic construct
  source 1..94: mol_type = other RNA
ccagtgggtagtgggatcctgggtgcacacagcaaagcctctttggaggctgaatggggtcccccgactctggctttcccccaggtctatatgt

SEQ ID NO: 26915 - RNA, 94 nt, synthetic construct
  source 1..94: mol_type = other RNA
ccagtgggtagtgggatcctgggtgcacacagcaaagcctctttggaggctgaatggggtcccccgactctggctttcccccaggtttatatgt

SEQ ID NO: 26916 - RNA, 94 nt, synthetic construct
  source 1..94: mol_type = other RNA
ccagtgggtagtgggatcctgggtgcacacagcaaagcctctttggaggctgaatggggtcccccgactctggctttcccccaggtgtatatgt

SEQ ID NO: 26917 - RNA, 94 nt, synthetic construct
  source 1..94: mol_type = other RNA
ccagtgggtagtgggatcctgggtgcacacagcaaagcctctttggaggctgaatggggtcccccgactctggctttcccccaggtttacatgt

SEQ ID NO: 26918 - RNA, 94 nt, synthetic construct
  source 1..94: mol_type = other RNA
ccagtgggtagtgggatcctgggtgcacacagcaaagcctctttggaggctgaatggggtcccccgactctggctttcccccaggtatacatgt

SEQ ID NO: 26919 - RNA, 94 nt, synthetic construct
  source 1..94: mol_type = other RNA
ccagtgggtagtgggatcctgggtgcacacagcaaagcctctttggaggctgaatggggtcccccgactctggctttcccccaggtatatatgt

SEQ ID NO: 26920 - RNA, 94 nt, synthetic construct
  source 1..94: mol_type = other RNA
ccagtgggtagtgggatcctgggtgcacacagcaaagcctctttggaggctgaatggggtcccccgactctggctttcccccaggtctacatgt

SEQ ID NO: 26921 - RNA, 95 nt, synthetic construct
  source 1..95: mol_type = other RNA
tccagtgggtagtgggatcctgggtgcacacagcaaagcctctttggaggctgaatggggtcccccgactctggctttcccccaggtgtacatgt

SEQ ID NO: 26922 - RNA, 95 nt, synthetic construct
  source 1..95: mol_type = other RNA
tccagtgggtagtgggatcctgggtgcacacagcaaagcctctttggaggctgaatggggtcccccgactctggctttcccccaggtatacatgt

SEQ ID NO: 26923 - RNA, 95 nt, synthetic construct
  source 1..95: mol_type = other RNA
tccagtgggtagtgggatcctgggtgcacacagcaaagcctctttggaggctgaatggggtcccccgactctggctttcccccaggtttatatgt

SEQ ID NO: 26924 - RNA, 95 nt, synthetic construct
  source 1..95: mol_type = other RNA
tccagtgggtagtgggatcctgggtgcacacagcaaagcctctttggaggctgaatggggtcccccgactctggctttcccccaggtttacatgt

SEQ ID NO: 26925 - RNA, 95 nt, synthetic construct
  source 1..95: mol_type = other RNA
tccagtgggtagtgggatcctgggtgcacacagcaaagcctctttggaggctgaatggggtcccccgactctggctttcccccaggtatatatgt

SEQ ID NO: 26926 - RNA, 95 nt, synthetic construct
  source 1..95: mol_type = other RNA
tccagtgggtagtgggatcctgggtgcacacagcaaagcctctttggaggctgaatggggtcccccgactctggctttcccccaggtctacatgt

SEQ ID NO: 26927 - RNA, 95 nt, synthetic construct
  source 1..95: mol_type = other RNA
tccagtgggtagtgggatcctgggtgcacacagcaaagcctctttggaggctgaatggggtcccccgactctggctttcccccaggtgtatatgt

SEQ ID NO: 26928 - RNA, 95 nt, synthetic construct
  source 1..95: mol_type = other RNA
tccagtgggtagtgggatcctgggtgcacacagcaaagcctctttggaggctgaatggggtcccccgactctggctttcccccaggtctatatgt

SEQ ID NO: 26929 - RNA, 96 nt, synthetic construct
  source 1..96: mol_type = other RNA
ctccagtgggtagtgggatcctgggtgcacacagcaaagcctctttggaggctgaatggggtcccccgactctggctttcccccaggtttatatgt

SEQ ID NO: 26930 - RNA, 96 nt, synthetic construct
  source 1..96: mol_type = other RNA
ctccagtgggtagtgggatcctgggtgcacacagcaaagcctctttggaggctgaatggggtcccccgactctggctttcccccaggtttacatgt

SEQ ID NO: 26931 - RNA, 96 nt, synthetic construct
  source 1..96: mol_type = other RNA
ctccagtgggtagtgggatcctgggtgcacacagcaaagcctctttggaggctgaatggggtcccccgactctggctttcccccaggtgtatatgt

SEQ ID NO: 26932 - RNA, 96 nt, synthetic construct
  source 1..96: mol_type = other RNA
ctccagtgggtagtgggatcctgggtgcacacagcaaagcctctttggaggctgaatggggtcccccgactctggctttcccccaggtgtacatgt

SEQ ID NO: 26933 - RNA, 96 nt, synthetic construct
  source 1..96: mol_type = other RNA
ctccagtgggtagtgggatcctgggtgcacacagcaaagcctctttggaggctgaatggggtcccccgactctggctttcccccaggtctatatgt

SEQ ID NO: 26934 - RNA, 96 nt, synthetic construct
  source 1..96: mol_type = other RNA
ctccagtgggtagtgggatcctgggtgcacacagcaaagcctctttggaggctgaatggggtcccccgactctggctttcccccaggtatatatgt

SEQ ID NO: 26935 - RNA, 96 nt, synthetic construct
  source 1..96: mol_type = other RNA
ctccagtgggtagtgggatcctgggtgcacacagcaaagcctctttggaggctgaatggggtcccccgactctggctttcccccaggtatacatgt

SEQ ID NO: 26936 - RNA, 96 nt, synthetic construct
  source 1..96: mol_type = other RNA
ctccagtgggtagtgggatcctgggtgcacacagcaaagcctctttggaggctgaatggggtcccccgactctggctttcccccaggtctacatgt

SEQ ID NO: 26937 - RNA, 97 nt, synthetic construct
  source 1..97: mol_type = other RNA
cctccagtgggtagtgggatcctgggtgcacacagcaaagcctctttggaggctgaatggggtcccccgactctggctttcccccaggtgtatatgt

SEQ ID NO: 26938 - RNA, 97 nt, synthetic construct
  source 1..97: mol_type = other RNA
cctccagtgggtagtgggatcctgggtgcacacagcaaagcctctttggaggctgaatggggtcccccgactctggctttcccccaggtctacatgt

SEQ ID NO: 26939 - RNA, 97 nt, synthetic construct
  source 1..97: mol_type = other RNA
cctccagtgggtagtgggatcctgggtgcacacagcaaagcctctttggaggctgaatggggtcccccgactctggctttcccccaggtctatatgt

SEQ ID NO: 26940 - RNA, 97 nt, synthetic construct
  source 1..97: mol_type = other RNA
cctccagtgggtagtgggatcctgggtgcacacagcaaagcctctttggaggctgaatggggtcccccgactctggctttcccccaggtgtacatgt

SEQ ID NO: 26941 - RNA, 97 nt, synthetic construct
  source 1..97: mol_type = other RNA
cctccagtgggtagtgggatcctgggtgcacacagcaaagcctctttggaggctgaatggggtcccccgactctggctttcccccaggtttacatgt

SEQ ID NO: 26942 - RNA, 97 nt, synthetic construct
  source 1..97: mol_type = other RNA
cctccagtgggtagtgggatcctgggtgcacacagcaaagcctctttggaggctgaatggggtcccccgactctggctttcccccaggtttatatgt

SEQ ID NO: 26943 - RNA, 97 nt, synthetic construct
  source 1..97: mol_type = other RNA
cctccagtgggtagtgggatcctgggtgcacacagcaaagcctctttggaggctgaatggggtcccccgactctggctttcccccaggtatacatgt

SEQ ID NO: 26944 - RNA, 97 nt, synthetic construct
  source 1..97: mol_type = other RNA
cctccagtgggtagtgggatcctgggtgcacacagcaaagcctctttggaggctgaatggggtcccccgactctggctttcccccaggtatatatgt

SEQ ID NO: 26945 - RNA, 98 nt, synthetic construct
  source 1..98: mol_type = other RNA
tcctccagtgggtagtgggatcctgggtgcacacagcaaagcctctttggaggctgaatggggtcccccgactctggctttcccccaggtttacatgt

SEQ ID NO: 26946 - RNA, 98 nt, synthetic construct
  source 1..98: mol_type = other RNA
tcctccagtgggtagtgggatcctgggtgcacacagcaaagcctctttggaggctgaatggggtcccccgactctggctttcccccaggtatacatgt

SEQ ID NO: 26947 - RNA, 98 nt, synthetic construct
  source 1..98: mol_type = other RNA
tcctccagtgggtagtgggatcctgggtgcacacagcaaagcctctttggaggctgaatggggtcccccgactctggctttcccccaggtctacatgt

SEQ ID NO: 26948 - RNA, 98 nt, synthetic construct
  source 1..98: mol_type = other RNA
tcctccagtgggtagtgggatcctgggtgcacacagcaaagcctctttggaggctgaatggggtcccccgactctggctttcccccaggtttatatgt

SEQ ID NO: 26949 - RNA, 98 nt, synthetic construct
  source 1..98: mol_type = other RNA
tcctccagtgggtagtgggatcctgggtgcacacagcaaagcctctttggaggctgaatggggtcccccgactctggctttcccccaggtgtacatgt

SEQ ID NO: 26950 - RNA, 98 nt, synthetic construct
  source 1..98: mol_type = other RNA
tcctccagtgggtagtgggatcctgggtgcacacagcaaagcctctttggaggctgaatggggtcccccgactctggctttcccccaggtgtatatgt

SEQ ID NO: 26951 - RNA, 98 nt, synthetic construct
  source 1..98: mol_type = other RNA
tcctccagtgggtagtgggatcctgggtgcacacagcaaagcctctttggaggctgaatggggtcccccgactctggctttcccccaggtatatatgt

SEQ ID NO: 26952 - RNA, 98 nt, synthetic construct
  source 1..98: mol_type = other RNA
tcctccagtgggtagtgggatcctgggtgcacacagcaaagcctctttggaggctgaatggggtcccccgactctggctttcccccaggtctatatgt

SEQ ID NO: 26953 - RNA, 99 nt, synthetic construct
  source 1..99: mol_type = other RNA
ttcctccagtgggtagtgggatcctgggtgcacacagcaaagcctctttggaggctgaatggggtcccccgactctggctttcccccaggtttatatgt

SEQ ID NO: 26954 - RNA, 99 nt, synthetic construct
  source 1..99: mol_type = other RNA
ttcctccagtgggtagtgggatcctgggtgcacacagcaaagcctctttggaggctgaatggggtcccccgactctggctttcccccaggtgtatatgt

SEQ ID NO: 26955 - RNA, 99 nt, synthetic construct
  source 1..99: mol_type = other RNA
ttcctccagtgggtagtgggatcctgggtgcacacagcaaagcctctttggaggctgaatggggtcccccgactctggctttcccccaggtgtacatgt

SEQ ID NO: 26956 - RNA, 99 nt, synthetic construct
  source 1..99: mol_type = other RNA
ttcctccagtgggtagtgggatcctgggtgcacacagcaaagcctctttggaggctgaatggggtcccccgactctggctttcccccaggtctacatgt

SEQ ID NO: 26957 - RNA, 99 nt, synthetic construct
  source 1..99: mol_type = other RNA
ttcctccagtgggtagtgggatcctgggtgcacacagcaaagcctctttggaggctgaatggggtcccccgactctggctttcccccaggtatacatgt

SEQ ID NO: 26958 - RNA, 99 nt, synthetic construct
  source 1..99: mol_type = other RNA
ttcctccagtgggtagtgggatcctgggtgcacacagcaaagcctctttggaggctgaatggggtcccccgactctggctttcccccaggtatatatgt

SEQ ID NO: 26959 - RNA, 99 nt, synthetic construct
  source 1..99: mol_type = other RNA
ttcctccagtgggtagtgggatcctgggtgcacacagcaaagcctctttggaggctgaatggggtcccccgactctggctttcccccaggtctatatgt

SEQ ID NO: 26960 - RNA, 99 nt, synthetic construct
  source 1..99: mol_type = other RNA
ttcctccagtgggtagtgggatcctgggtgcacacagcaaagcctctttggaggctgaatggggtcccccgactctggctttcccccaggtttacatgt

SEQ ID NO: 26961 - RNA, 100 nt, synthetic construct
  source 1..100: mol_type = other RNA
cttcctccagtgggtagtgggatcctgggtgcacacagcaaagcctctttggaggctgaatggggtcccccgactctggctttcccccaggtatacatgt

SEQ ID NO: 26962 - RNA, 100 nt, synthetic construct
  source 1..100: mol_type = other RNA
cttcctccagtgggtagtgggatcctgggtgcacacagcaaagcctctttggaggctgaatggggtcccccgactctggctttcccccaggtgtacatgt

SEQ ID NO: 26963 - RNA, 100 nt, synthetic construct
  source 1..100: mol_type = other RNA
cttcctccagtgggtagtgggatcctgggtgcacacagcaaagcctctttggaggctgaatggggtcccccgactctggctttcccccaggtctatatgt

SEQ ID NO: 26964 - RNA, 100 nt, synthetic construct
  source 1..100: mol_type = other RNA
cttcctccagtgggtagtgggatcctgggtgcacacagcaaagcctctttggaggctgaatggggtcccccgactctggctttcccccaggtttatatgt

SEQ ID NO: 26965 - RNA, 100 nt, synthetic construct
  source 1..100: mol_type = other RNA
cttcctccagtgggtagtgggatcctgggtgcacacagcaaagcctctttggaggctgaatggggtcccccgactctggctttcccccaggtatatatgt

SEQ ID NO: 26966 - RNA, 100 nt, synthetic construct
  source 1..100: mol_type = other RNA
cttcctccagtgggtagtgggatcctgggtgcacacagcaaagcctctttggaggctgaatggggtcccccgactctggctttcccccaggtttacatgt

SEQ ID NO: 26967 - RNA, 100 nt, synthetic construct
  source 1..100: mol_type = other RNA
cttcctccagtgggtagtgggatcctgggtgcacacagcaaagcctctttggaggctgaatggggtcccccgactctggctttcccccaggtgtatatgt

SEQ ID NO: 26968 - RNA, 100 nt, synthetic construct
  source 1..100: mol_type = other RNA
cttcctccagtgggtagtgggatcctgggtgcacacagcaaagcctctttggaggctgaatggggtcccccgactctggctttcccccaggtctacatgt

SEQ ID NO: 26969 - RNA, 101 nt, synthetic construct
  source 1..101: mol_type = other RNA
gcttcctccagtgggtagtgggatcctgggtgcacacagcaaagcctctttggaggctgaatggggtcccccgactctggctttcccccaggtctacatgt

SEQ ID NO: 26970 - RNA, 101 nt, synthetic construct
  source 1..101: mol_type = other RNA
gcttcctccagtgggtagtgggatcctgggtgcacacagcaaagcctctttggaggctgaatggggtcccccgactctggctttcccccaggtttatatgt

SEQ ID NO: 26971 - RNA, 101 nt, synthetic construct
  source 1..101: mol_type = other RNA
gcttcctccagtgggtagtgggatcctgggtgcacacagcaaagcctctttggaggctgaatggggtcccccgactctggctttcccccaggtttacatgt

SEQ ID NO: 26972 - RNA, 101 nt, synthetic construct
  source 1..101: mol_type = other RNA
gcttcctccagtgggtagtgggatcctgggtgcacacagcaaagcctctttggaggctgaatggggtcccccgactctggctttcccccaggtctatatgt

SEQ ID NO: 26973 - RNA, 101 nt, synthetic construct
  source 1..101: mol_type = other RNA
gcttcctccagtgggtagtgggatcctgggtgcacacagcaaagcctctttggaggctgaatggggtcccccgactctggctttcccccaggtatacatgt

SEQ ID NO: 26974 - RNA, 101 nt, synthetic construct
  source 1..101: mol_type = other RNA
gcttcctccagtgggtagtgggatcctgggtgcacacagcaaagcctctttggaggctgaatggggtcccccgactctggctttcccccaggtgtacatgt

SEQ ID NO: 26975 - RNA, 101 nt, synthetic construct
  source 1..101: mol_type = other RNA
gcttcctccagtgggtagtgggatcctgggtgcacacagcaaagcctctttggaggctgaatggggtcccccgactctggctttcccccaggtgtatatgt

SEQ ID NO: 26976 - RNA, 101 nt, synthetic construct
  source 1..101: mol_type = other RNA
gcttcctccagtgggtagtgggatcctgggtgcacacagcaaagcctctttggaggctgaatggggtcccccgactctggctttcccccaggtatatatgt

SEQ ID NO: 26977 - RNA, 102 nt, synthetic construct
  source 1..102: mol_type = other RNA
ggcttcctccagtgggtagtgggatcctgggtgcacacagcaaagcctctttggaggctgaatggggtcccccgactctggctttcccccaggtatatatgt

SEQ ID NO: 26978 - RNA, 102 nt, synthetic construct
  source 1..102: mol_type = other RNA
ggcttcctccagtgggtagtgggatcctgggtgcacacagcaaagcctctttggaggctgaatggggtcccccgactctggctttcccccaggtgtatatgt

SEQ ID NO: 26979 - RNA, 102 nt, synthetic construct
  source 1..102: mol_type = other RNA
ggcttcctccagtgggtagtgggatcctgggtgcacacagcaaagcctctttggaggctgaatggggtcccccgactctggctttcccccaggtgtacatgt

SEQ ID NO: 26980 - RNA, 102 nt, synthetic construct
  source 1..102: mol_type = other RNA
ggcttcctccagtgggtagtgggatcctgggtgcacacagcaaagcctctttggaggctgaatggggtcccccgactctggctttcccccaggtctatatgt

SEQ ID NO: 26981 - RNA, 102 nt, synthetic construct
  source 1..102: mol_type = other RNA
ggcttcctccagtgggtagtgggatcctgggtgcacacagcaaagcctctttggaggctgaatggggtcccccgactctggctttcccccaggtatacatgt

SEQ ID NO: 26982 - RNA, 102 nt, synthetic construct
  source 1..102: mol_type = other RNA
ggcttcctccagtgggtagtgggatcctgggtgcacacagcaaagcctctttggaggctgaatggggtcccccgactctggctttcccccaggtttatatgt

SEQ ID NO: 26983 - RNA, 102 nt, synthetic construct
  source 1..102: mol_type = other RNA
ggcttcctccagtgggtagtgggatcctgggtgcacacagcaaagcctctttggaggctgaatggggtcccccgactctggctttcccccaggtctacatgt

SEQ ID NO: 26984 - RNA, 102 nt, synthetic construct
  source 1..102: mol_type = other RNA
ggcttcctccagtgggtagtgggatcctgggtgcacacagcaaagcctctttggaggctgaatggggtcccccgactctggctttcccccaggtttacatgt

SEQ ID NO: 26985 - RNA, 103 nt, synthetic construct
  source 1..103: mol_type = other RNA
gggcttcctccagtgggtagtgggatcctgggtgcacacagcaaagcctctttggaggctgaatggggtcccccgactctggctttcccccaggtctatatgt

SEQ ID NO: 26986 - RNA, 103 nt, synthetic construct
  source 1..103: mol_type = other RNA
gggcttcctccagtgggtagtgggatcctgggtgcacacagcaaagcctctttggaggctgaatggggtcccccgactctggctttcccccaggtgtatatgt

SEQ ID NO: 26987 - RNA, 103 nt, synthetic construct
  source 1..103: mol_type = other RNA
gggcttcctccagtgggtagtgggatcctgggtgcacacagcaaagcctctttggaggctgaatggggtcccccgactctggctttcccccaggtgtacatgt

SEQ ID NO: 26988 - RNA, 103 nt, synthetic construct
  source 1..103: mol_type = other RNA
gggcttcctccagtgggtagtgggatcctgggtgcacacagcaaagcctctttggaggctgaatggggtcccccgactctggctttcccccaggtatacatgt

SEQ ID NO: 26989 - RNA, 103 nt, synthetic construct
  source 1..103: mol_type = other RNA
gggcttcctccagtgggtagtgggatcctgggtgcacacagcaaagcctctttggaggctgaatggggtcccccgactctggctttcccccaggtctacatgt

SEQ ID NO: 26990 - RNA, 103 nt, synthetic construct
  source 1..103: mol_type = other RNA
gggcttcctccagtgggtagtgggatcctgggtgcacacagcaaagcctctttggaggctgaatggggtcccccgactctggctttcccccaggtatatatgt

SEQ ID NO: 26991 - RNA, 103 nt, synthetic construct
  source 1..103: mol_type = other RNA
gggcttcctccagtgggtagtgggatcctgggtgcacacagcaaagcctctttggaggctgaatggggtcccccgactctggctttcccccaggtttacatgt

SEQ ID NO: 26992 - RNA, 103 nt, synthetic construct
  source 1..103: mol_type = other RNA
gggcttcctccagtgggtagtgggatcctgggtgcacacagcaaagcctctttggaggctgaatggggtcccccgactctggctttcccccaggtttatatgt

SEQ ID NO: 26993 - RNA, 20 nt, synthetic construct
  source 1..20: mol_type = other RNA
ggctttcccccaggtatata

SEQ ID NO: 26994 - RNA, 20 nt, synthetic construct
  source 1..20: mol_type = other RNA
ggctttcccccaggtctata

SEQ ID NO: 26995 - RNA, 20 nt, synthetic construct
  source 1..20: mol_type = other RNA
ggctttcccccaggtgtata

SEQ ID NO: 26996 - RNA, 20 nt, synthetic construct
  source 1..20: mol_type = other RNA
ggctttcccccaggtttata

SEQ ID NO: 26997 - RNA, 20 nt, synthetic construct
  source 1..20: mol_type = other RNA
cccccaggtgtatatgttcc

SEQ ID NO: 26998 - RNA, 20 nt, synthetic construct
  source 1..20: mol_type = other RNA
cccccaggtttatatgttcc

SEQ ID NO: 26999 - RNA, 20 nt, synthetic construct
  source 1..20: mol_type = other RNA
cccccaggtatatatgttcc

SEQ ID NO: 27000 - RNA, 20 nt, synthetic construct
  source 1..20: mol_type = other RNA
cccccaggtctatatgttcc

SEQ ID NO: 27001 - RNA, 16 nt, synthetic construct
  source 1..16: mol_type = other RNA
acactcacatggaact

SEQ ID NO: 27002 - RNA, 17 nt, synthetic construct
  source 1..17: mol_type = other RNA
cacactcacatggaact

SEQ ID NO: 27003 - RNA, 18 nt, synthetic construct
  source 1..18: mol_type = other RNA
ccacactcacatggaact

SEQ ID NO: 27004 - RNA, 19 nt, synthetic construct
  source 1..19: mol_type = other RNA
cccacactcacatggaact

SEQ ID NO: 27005 - RNA, 20 nt, synthetic construct
  source 1..20: mol_type = other RNA
ccccacactcacatggaact

SEQ ID NO: 27006 - RNA, 21 nt, synthetic construct
  source 1..21: mol_type = other RNA
tccccacactcacatggaact

SEQ ID NO: 27007 - RNA, 22 nt, synthetic construct
  source 1..22: mol_type = other RNA
atccccacactcacatggaact

SEQ ID NO: 27008-27013 - skipped (6 entries)

SEQ ID NO: 27014 - RNA, 10 nt, synthetic construct
  source 1..10: mol_type = other RNA
tccatgtgag

SEQ ID NO: 27015 - RNA, 11 nt, synthetic construct
  source 1..11: mol_type = other RNA
tccatgtgagt

SEQ ID NO: 27016 - RNA, 12 nt, synthetic construct
  source 1..12: mol_type = other RNA
tccatgtgagtg

SEQ ID NO: 27017 - RNA, 13 nt, synthetic construct
  source 1..13: mol_type = other RNA
tccatgtgagtgt

SEQ ID NO: 27018 - RNA, 14 nt, synthetic construct
  source 1..14: mol_type = other RNA
tccatgtgagtgtg

SEQ ID NO: 27019 - RNA, 15 nt, synthetic construct
  source 1..15: mol_type = other RNA
tccatgtgagtgtgg

SEQ ID NO: 27020 - RNA, 16 nt, synthetic construct
  source 1..16: mol_type = other RNA
tccatgtgagtgtggg

SEQ ID NO: 27021 - RNA, 17 nt, synthetic construct
  source 1..17: mol_type = other RNA
tccatgtgagtgtgggg

SEQ ID NO: 27022 - RNA, 18 nt, synthetic construct
  source 1..18: mol_type = other RNA
tccatgtgagtgtgggga

SEQ ID NO: 27023 - RNA, 19 nt, synthetic construct
  source 1..19: mol_type = other RNA
tccatgtgagtgtggggat

SEQ ID NO: 27024 - RNA, 76 nt, synthetic construct
  source 1..76: mol_type = other RNA
gtttacatgttcctggtgaaatggcaggacctgtcggagaaggtggtctaccggcgcttcaccgagatctacgagt

SEQ ID NO: 27025 - RNA, 76 nt, synthetic construct
  source 1..76: mol_type = other RNA
gtgtacatgttcctggtgaaatggcaggacctgtcggagaaggtggtctaccggcgcttcaccgagatctatgagt

SEQ ID NO: 27026 - RNA, 76 nt, synthetic construct
  source 1..76: mol_type = other RNA
gtttacatgttcctggtgaaatggcaggacctgtcggagaaggtggtctaccggcgcttcaccgagatctatgagt

SEQ ID NO: 27027 - RNA, 76 nt, synthetic construct
  source 1..76: mol_type = other RNA
gtctacatgttcctggtgaaatggcaggacctgtcggagaaggtggtctaccggcgcttcaccgagatctatgagt

SEQ ID NO: 27028 - RNA, 76 nt, synthetic construct
  source 1..76: mol_type = other RNA
gtctacatgttcctggtgaaatggcaggacctgtcggagaaggtggtctaccggcgcttcaccgagatctacgagt

SEQ ID NO: 27029 - RNA, 76 nt, synthetic construct
  source 1..76: mol_type = other RNA
gtatacatgttcctggtgaaatggcaggacctgtcggagaaggtggtctaccggcgcttcaccgagatctatgagt

SEQ ID NO: 27030 - RNA, 76 nt, synthetic construct
  source 1..76: mol_type = other RNA
gtatacatgttcctggtgaaatggcaggacctgtcggagaaggtggtctaccggcgcttcaccgagatctacgagt

SEQ ID NO: 27031 - RNA, 76 nt, synthetic construct
  source 1..76: mol_type = other RNA
gtgtacatgttcctggtgaaatggcaggacctgtcggagaaggtggtctaccggcgcttcaccgagatctacgagt

SEQ ID NO: 27032 - RNA, 77 nt, synthetic construct
  source 1..77: mol_type = other RNA
ggtgtacatgttcctggtgaaatggcaggacctgtcggagaaggtggtctaccggcgcttcaccgagatctatgagt

SEQ ID NO: 27033 - RNA, 77 nt, synthetic construct
  source 1..77: mol_type = other RNA
ggtctacatgttcctggtgaaatggcaggacctgtcggagaaggtggtctaccggcgcttcaccgagatctatgagt

SEQ ID NO: 27034 - RNA, 77 nt, synthetic construct
  source 1..77: mol_type = other RNA
ggtatacatgttcctggtgaaatggcaggacctgtcggagaaggtggtctaccggcgcttcaccgagatctacgagt

SEQ ID NO: 27035 - RNA, 77 nt, synthetic construct
  source 1..77: mol_type = other RNA
ggtatacatgttcctggtgaaatggcaggacctgtcggagaaggtggtctaccggcgcttcaccgagatctatgagt

SEQ ID NO: 27036 - RNA, 77 nt, synthetic construct
  source 1..77: mol_type = other RNA
ggtttacatgttcctggtgaaatggcaggacctgtcggagaaggtggtctaccggcgcttcaccgagatctacgagt

SEQ ID NO: 27037 - RNA, 77 nt, synthetic construct
  source 1..77: mol_type = other RNA
ggtctacatgttcctggtgaaatggcaggacctgtcggagaaggtggtctaccggcgcttcaccgagatctacgagt

SEQ ID NO: 27038 - RNA, 77 nt, synthetic construct
  source 1..77: mol_type = other RNA
ggtttacatgttcctggtgaaatggcaggacctgtcggagaaggtggtctaccggcgcttcaccgagatctatgagt

SEQ ID NO: 27039 - RNA, 77 nt, synthetic construct
  source 1..77: mol_type = other RNA
ggtgtacatgttcctggtgaaatggcaggacctgtcggagaaggtggtctaccggcgcttcaccgagatctacgagt

SEQ ID NO: 27040 - RNA, 78 nt, synthetic construct
  source 1..78: mol_type = other RNA
aggtctacatgttcctggtgaaatggcaggacctgtcggagaaggtggtctaccggcgcttcaccgagatctatgagt

SEQ ID NO: 27041 - RNA, 78 nt, synthetic construct
  source 1..78: mol_type = other RNA
aggtatacatgttcctggtgaaatggcaggacctgtcggagaaggtggtctaccggcgcttcaccgagatctacgagt

SEQ ID NO: 27042 - RNA, 78 nt, synthetic construct
  source 1..78: mol_type = other RNA
aggtctacatgttcctggtgaaatggcaggacctgtcggagaaggtggtctaccggcgcttcaccgagatctacgagt

SEQ ID NO: 27043 - RNA, 78 nt, synthetic construct
  source 1..78: mol_type = other RNA
aggtatacatgttcctggtgaaatggcaggacctgtcggagaaggtggtctaccggcgcttcaccgagatctatgagt

SEQ ID NO: 27044 - RNA, 78 nt, synthetic construct
  source 1..78: mol_type = other RNA
aggtgtacatgttcctggtgaaatggcaggacctgtcggagaaggtggtctaccggcgcttcaccgagatctatgagt

SEQ ID NO: 27045 - RNA, 78 nt, synthetic construct
  source 1..78: mol_type = other RNA
aggtttacatgttcctggtgaaatggcaggacctgtcggagaaggtggtctaccggcgcttcaccgagatctatgagt

SEQ ID NO: 27046 - RNA, 78 nt, synthetic construct
  source 1..78: mol_type = other RNA
aggtgtacatgttcctggtgaaatggcaggacctgtcggagaaggtggtctaccggcgcttcaccgagatctacgagt

SEQ ID NO: 27047 - RNA, 78 nt, synthetic construct
  source 1..78: mol_type = other RNA
aggtttacatgttcctggtgaaatggcaggacctgtcggagaaggtggtctaccggcgcttcaccgagatctacgagt

SEQ ID NO: 27048 - RNA, 79 nt, synthetic construct
  source 1..79: mol_type = other RNA
caggtatacatgttcctggtgaaatggcaggacctgtcggagaaggtggtctaccggcgcttcaccgagatctatgagt

SEQ ID NO: 27049 - RNA, 79 nt, synthetic construct
  source 1..79: mol_type = other RNA
caggtatacatgttcctggtgaaatggcaggacctgtcggagaaggtggtctaccggcgcttcaccgagatctacgagt

SEQ ID NO: 27050 - RNA, 79 nt, synthetic construct
  source 1..79: mol_type = other RNA
caggtttacatgttcctggtgaaatggcaggacctgtcggagaaggtggtctaccggcgcttcaccgagatctacgagt

SEQ ID NO: 27051 - RNA, 79 nt, synthetic construct
  source 1..79: mol_type = other RNA
caggtttacatgttcctggtgaaatggcaggacctgtcggagaaggtggtctaccggcgcttcaccgagatctatgagt

SEQ ID NO: 27052 - RNA, 79 nt, synthetic construct
  source 1..79: mol_type = other RNA
caggtgtacatgttcctggtgaaatggcaggacctgtcggagaaggtggtctaccggcgcttcaccgagatctacgagt

SEQ ID NO: 27053 - RNA, 79 nt, synthetic construct
  source 1..79: mol_type = other RNA
caggtctacatgttcctggtgaaatggcaggacctgtcggagaaggtggtctaccggcgcttcaccgagatctatgagt

SEQ ID NO: 27054 - RNA, 79 nt, synthetic construct
  source 1..79: mol_type = other RNA
caggtctacatgttcctggtgaaatggcaggacctgtcggagaaggtggtctaccggcgcttcaccgagatctacgagt

SEQ ID NO: 27055 - RNA, 79 nt, synthetic construct
  source 1..79: mol_type = other RNA
caggtgtacatgttcctggtgaaatggcaggacctgtcggagaaggtggtctaccggcgcttcaccgagatctatgagt

SEQ ID NO: 27056 - RNA, 80 nt, synthetic construct
  source 1..80: mol_type = other RNA
ccaggtttacatgttcctggtgaaatggcaggacctgtcggagaaggtggtctaccggcgcttcaccgagatctacgagt

SEQ ID NO: 27057 - RNA, 80 nt, synthetic construct
  source 1..80: mol_type = other RNA
ccaggtctacatgttcctggtgaaatggcaggacctgtcggagaaggtggtctaccggcgcttcaccgagatctatgagt

SEQ ID NO: 27058 - RNA, 80 nt, synthetic construct
  source 1..80: mol_type = other RNA
ccaggtgtacatgttcctggtgaaatggcaggacctgtcggagaaggtggtctaccggcgcttcaccgagatctatgagt

SEQ ID NO: 27059 - RNA, 80 nt, synthetic construct
  source 1..80: mol_type = other RNA
ccaggtatacatgttcctggtgaaatggcaggacctgtcggagaaggtggtctaccggcgcttcaccgagatctatgagt

SEQ ID NO: 27060 - RNA, 80 nt, synthetic construct
  source 1..80: mol_type = other RNA
ccaggtatacatgttcctggtgaaatggcaggacctgtcggagaaggtggtctaccggcgcttcaccgagatctacgagt

SEQ ID NO: 27061 - RNA, 80 nt, synthetic construct
  source 1..80: mol_type = other RNA
ccaggtctacatgttcctggtgaaatggcaggacctgtcggagaaggtggtctaccggcgcttcaccgagatctacgagt

SEQ ID NO: 27062 - RNA, 80 nt, synthetic construct
  source 1..80: mol_type = other RNA
ccaggtgtacatgttcctggtgaaatggcaggacctgtcggagaaggtggtctaccggcgcttcaccgagatctacgagt

SEQ ID NO: 27063 - RNA, 80 nt, synthetic construct
  source 1..80: mol_type = other RNA
ccaggtttacatgttcctggtgaaatggcaggacctgtcggagaaggtggtctaccggcgcttcaccgagatctatgagt

SEQ ID NO: 27064 - RNA, 81 nt, synthetic construct
  source 1..81: mol_type = other RNA
cccaggtatacatgttcctggtgaaatggcaggacctgtcggagaaggtggtctaccggcgcttcaccgagatctatgagt

SEQ ID NO: 27065 - RNA, 81 nt, synthetic construct
  source 1..81: mol_type = other RNA
cccaggtttacatgttcctggtgaaatggcaggacctgtcggagaaggtggtctaccggcgcttcaccgagatctacgagt

SEQ ID NO: 27066 - RNA, 81 nt, synthetic construct
  source 1..81: mol_type = other RNA
cccaggtctacatgttcctggtgaaatggcaggacctgtcggagaaggtggtctaccggcgcttcaccgagatctatgagt

SEQ ID NO: 27067 - RNA, 81 nt, synthetic construct
  source 1..81: mol_type = other RNA
cccaggtgtacatgttcctggtgaaatggcaggacctgtcggagaaggtggtctaccggcgcttcaccgagatctacgagt

SEQ ID NO: 27068 - RNA, 81 nt, synthetic construct
  source 1..81: mol_type = other RNA
cccaggtttacatgttcctggtgaaatggcaggacctgtcggagaaggtggtctaccggcgcttcaccgagatctatgagt

SEQ ID NO: 27069 - RNA, 81 nt, synthetic construct
  source 1..81: mol_type = other RNA
cccaggtctacatgttcctggtgaaatggcaggacctgtcggagaaggtggtctaccggcgcttcaccgagatctacgagt

SEQ ID NO: 27070 - RNA, 81 nt, synthetic construct
  source 1..81: mol_type = other RNA
cccaggtgtacatgttcctggtgaaatggcaggacctgtcggagaaggtggtctaccggcgcttcaccgagatctatgagt

SEQ ID NO: 27071 - RNA, 81 nt, synthetic construct
  source 1..81: mol_type = other RNA
cccaggtatacatgttcctggtgaaatggcaggacctgtcggagaaggtggtctaccggcgcttcaccgagatctacgagt

SEQ ID NO: 27072 - RNA, 82 nt, synthetic construct
  source 1..82: mol_type = other RNA
ccccaggtatacatgttcctggtgaaatggcaggacctgtcggagaaggtggtctaccggcgcttcaccgagatctacgagt

SEQ ID NO: 27073 - RNA, 82 nt, synthetic construct
  source 1..82: mol_type = other RNA
ccccaggtatacatgttcctggtgaaatggcaggacctgtcggagaaggtggtctaccggcgcttcaccgagatctatgagt

SEQ ID NO: 27074 - RNA, 82 nt, synthetic construct
  source 1..82: mol_type = other RNA
ccccaggtctacatgttcctggtgaaatggcaggacctgtcggagaaggtggtctaccggcgcttcaccgagatctatgagt

SEQ ID NO: 27075 - RNA, 82 nt, synthetic construct
  source 1..82: mol_type = other RNA
ccccaggtgtacatgttcctggtgaaatggcaggacctgtcggagaaggtggtctaccggcgcttcaccgagatctacgagt

SEQ ID NO: 27076 - RNA, 82 nt, synthetic construct
  source 1..82: mol_type = other RNA
ccccaggtgtacatgttcctggtgaaatggcaggacctgtcggagaaggtggtctaccggcgcttcaccgagatctatgagt

SEQ ID NO: 27077 - RNA, 82 nt, synthetic construct
  source 1..82: mol_type = other RNA
ccccaggtctacatgttcctggtgaaatggcaggacctgtcggagaaggtggtctaccggcgcttcaccgagatctacgagt

SEQ ID NO: 27078 - RNA, 82 nt, synthetic construct
  source 1..82: mol_type = other RNA
ccccaggtttacatgttcctggtgaaatggcaggacctgtcggagaaggtggtctaccggcgcttcaccgagatctatgagt

SEQ ID NO: 27079 - RNA, 82 nt, synthetic construct
  source 1..82: mol_type = other RNA
ccccaggtttacatgttcctggtgaaatggcaggacctgtcggagaaggtggtctaccggcgcttcaccgagatctacgagt

SEQ ID NO: 27080 - RNA, 83 nt, synthetic construct
  source 1..83: mol_type = other RNA
cccccaggtatacatgttcctggtgaaatggcaggacctgtcggagaaggtggtctaccggcgcttcaccgagatctatgagt

SEQ ID NO: 27081 - RNA, 83 nt, synthetic construct
  source 1..83: mol_type = other RNA
cccccaggtgtacatgttcctggtgaaatggcaggacctgtcggagaaggtggtctaccggcgcttcaccgagatctatgagt

SEQ ID NO: 27082 - RNA, 83 nt, synthetic construct
  source 1..83: mol_type = other RNA
cccccaggtttacatgttcctggtgaaatggcaggacctgtcggagaaggtggtctaccggcgcttcaccgagatctacgagt

SEQ ID NO: 27083 - RNA, 83 nt, synthetic construct
  source 1..83: mol_type = other RNA
cccccaggtatacatgttcctggtgaaatggcaggacctgtcggagaaggtggtctaccggcgcttcaccgagatctacgagt

SEQ ID NO: 27084 - RNA, 83 nt, synthetic construct
  source 1..83: mol_type = other RNA
cccccaggtctacatgttcctggtgaaatggcaggacctgtcggagaaggtggtctaccggcgcttcaccgagatctatgagt

SEQ ID NO: 27085 - RNA, 83 nt, synthetic construct
  source 1..83: mol_type = other RNA
cccccaggtctacatgttcctggtgaaatggcaggacctgtcggagaaggtggtctaccggcgcttcaccgagatctacgagt

SEQ ID NO: 27086 - RNA, 83 nt, synthetic construct
  source 1..83: mol_type = other RNA
cccccaggtttacatgttcctggtgaaatggcaggacctgtcggagaaggtggtctaccggcgcttcaccgagatctatgagt

SEQ ID NO: 27087 - RNA, 83 nt, synthetic construct
  source 1..83: mol_type = other RNA
cccccaggtgtacatgttcctggtgaaatggcaggacctgtcggagaaggtggtctaccggcgcttcaccgagatctacgagt

SEQ ID NO: 27088 - RNA, 84 nt, synthetic construct
  source 1..84: mol_type = other RNA
tcccccaggtatacatgttcctggtgaaatggcaggacctgtcggagaaggtggtctaccggcgcttcaccgagatctatgagt

SEQ ID NO: 27089 - RNA, 84 nt, synthetic construct
  source 1..84: mol_type = other RNA
tcccccaggtctacatgttcctggtgaaatggcaggacctgtcggagaaggtggtctaccggcgcttcaccgagatctacgagt

SEQ ID NO: 27090 - RNA, 84 nt, synthetic construct
  source 1..84: mol_type = other RNA
tcccccaggtatacatgttcctggtgaaatggcaggacctgtcggagaaggtggtctaccggcgcttcaccgagatctacgagt

SEQ ID NO: 27091 - RNA, 84 nt, synthetic construct
  source 1..84: mol_type = other RNA
tcccccaggtctacatgttcctggtgaaatggcaggacctgtcggagaaggtggtctaccggcgcttcaccgagatctatgagt

SEQ ID NO: 27092 - RNA, 84 nt, synthetic construct
  source 1..84: mol_type = other RNA
tcccccaggtgtacatgttcctggtgaaatggcaggacctgtcggagaaggtggtctaccggcgcttcaccgagatctacgagt

SEQ ID NO: 27093 - RNA, 84 nt, synthetic construct
  source 1..84: mol_type = other RNA
tcccccaggtgtacatgttcctggtgaaatggcaggacctgtcggagaaggtggtctaccggcgcttcaccgagatctatgagt

SEQ ID NO: 27094 - RNA, 84 nt, synthetic construct
  source 1..84: mol_type = other RNA
tcccccaggtttacatgttcctggtgaaatggcaggacctgtcggagaaggtggtctaccggcgcttcaccgagatctacgagt

SEQ ID NO: 27095 - RNA, 84 nt, synthetic construct
  source 1..84: mol_type = other RNA
tcccccaggtttacatgttcctggtgaaatggcaggacctgtcggagaaggtggtctaccggcgcttcaccgagatctatgagt

SEQ ID NO: 27096 - RNA, 85 nt, synthetic construct
  source 1..85: mol_type = other RNA
ttcccccaggtctacatgttcctggtgaaatggcaggacctgtcggagaaggtggtctaccggcgcttcaccgagatctatgagt

SEQ ID NO: 27097 - RNA, 85 nt, synthetic construct
  source 1..85: mol_type = other RNA
ttcccccaggtgtacatgttcctggtgaaatggcaggacctgtcggagaaggtggtctaccggcgcttcaccgagatctatgagt

SEQ ID NO: 27098 - RNA, 85 nt, synthetic construct
  source 1..85: mol_type = other RNA
ttcccccaggtttacatgttcctggtgaaatggcaggacctgtcggagaaggtggtctaccggcgcttcaccgagatctatgagt

SEQ ID NO: 27099 - RNA, 85 nt, synthetic construct
  source 1..85: mol_type = other RNA
ttcccccaggtttacatgttcctggtgaaatggcaggacctgtcggagaaggtggtctaccggcgcttcaccgagatctacgagt

SEQ ID NO: 27100 - RNA, 85 nt, synthetic construct
  source 1..85: mol_type = other RNA
ttcccccaggtctacatgttcctggtgaaatggcaggacctgtcggagaaggtggtctaccggcgcttcaccgagatctacgagt

SEQ ID NO: 27101 - RNA, 85 nt, synthetic construct
  source 1..85: mol_type = other RNA
ttcccccaggtatacatgttcctggtgaaatggcaggacctgtcggagaaggtggtctaccggcgcttcaccgagatctatgagt

SEQ ID NO: 27102 - RNA, 85 nt, synthetic construct
  source 1..85: mol_type = other RNA
ttcccccaggtatacatgttcctggtgaaatggcaggacctgtcggagaaggtggtctaccggcgcttcaccgagatctacgagt

SEQ ID NO: 27103 - RNA, 85 nt, synthetic construct
  source 1..85: mol_type = other RNA
ttcccccaggtgtacatgttcctggtgaaatggcaggacctgtcggagaaggtggtctaccggcgcttcaccgagatctacgagt

SEQ ID NO: 27104 - RNA, 86 nt, synthetic construct
  source 1..86: mol_type = other RNA
tttcccccaggtttacatgttcctggtgaaatggcaggacctgtcggagaaggtggtctaccggcgcttcaccgagatctacgagt

SEQ ID NO: 27105 - RNA, 86 nt, synthetic construct
  source 1..86: mol_type = other RNA
tttcccccaggtatacatgttcctggtgaaatggcaggacctgtcggagaaggtggtctaccggcgcttcaccgagatctacgagt

SEQ ID NO: 27106 - RNA, 86 nt, synthetic construct
  source 1..86: mol_type = other RNA
tttcccccaggtgtacatgttcctggtgaaatggcaggacctgtcggagaaggtggtctaccggcgcttcaccgagatctatgagt

SEQ ID NO: 27107 - RNA, 86 nt, synthetic construct
  source 1..86: mol_type = other RNA
tttcccccaggtgtacatgttcctggtgaaatggcaggacctgtcggagaaggtggtctaccggcgcttcaccgagatctacgagt

SEQ ID NO: 27108 - RNA, 86 nt, synthetic construct
  source 1..86: mol_type = other RNA
tttcccccaggtctacatgttcctggtgaaatggcaggacctgtcggagaaggtggtctaccggcgcttcaccgagatctatgagt

SEQ ID NO: 27109 - RNA, 86 nt, synthetic construct
  source 1..86: mol_type = other RNA
tttcccccaggtctacatgttcctggtgaaatggcaggacctgtcggagaaggtggtctaccggcgcttcaccgagatctacgagt

SEQ ID NO: 27110 - RNA, 86 nt, synthetic construct
  source 1..86: mol_type = other RNA
tttcccccaggtatacatgttcctggtgaaatggcaggacctgtcggagaaggtggtctaccggcgcttcaccgagatctatgagt

SEQ ID NO: 27111 - RNA, 86 nt, synthetic construct
  source 1..86: mol_type = other RNA
tttcccccaggtttacatgttcctggtgaaatggcaggacctgtcggagaaggtggtctaccggcgcttcaccgagatctatgagt

SEQ ID NO: 27112 - RNA, 87 nt, synthetic construct
  source 1..87: mol_type = other RNA
ctttcccccaggtatacatgttcctggtgaaatggcaggacctgtcggagaaggtggtctaccggcgcttcaccgagatctatgagt

SEQ ID NO: 27113 - RNA, 87 nt, synthetic construct
  source 1..87: mol_type = other RNA
ctttcccccaggtgtacatgttcctggtgaaatggcaggacctgtcggagaaggtggtctaccggcgcttcaccgagatctatgagt

SEQ ID NO: 27114 - RNA, 87 nt, synthetic construct
  source 1..87: mol_type = other RNA
ctttcccccaggtgtacatgttcctggtgaaatggcaggacctgtcggagaaggtggtctaccggcgcttcaccgagatctacgagt

SEQ ID NO: 27115 - RNA, 87 nt, synthetic construct
  source 1..87: mol_type = other RNA
ctttcccccaggtatacatgttcctggtgaaatggcaggacctgtcggagaaggtggtctaccggcgcttcaccgagatctacgagt

SEQ ID NO: 27116 - RNA, 87 nt, synthetic construct
  source 1..87: mol_type = other RNA
ctttcccccaggtctacatgttcctggtgaaatggcaggacctgtcggagaaggtggtctaccggcgcttcaccgagatctacgagt

SEQ ID NO: 27117 - RNA, 87 nt, synthetic construct
  source 1..87: mol_type = other RNA
ctttcccccaggtttacatgttcctggtgaaatggcaggacctgtcggagaaggtggtctaccggcgcttcaccgagatctacgagt

SEQ ID NO: 27118 - RNA, 87 nt, synthetic construct
  source 1..87: mol_type = other RNA
ctttcccccaggtttacatgttcctggtgaaatggcaggacctgtcggagaaggtggtctaccggcgcttcaccgagatctatgagt

SEQ ID NO: 27119 - RNA, 87 nt, synthetic construct
  source 1..87: mol_type = other RNA
ctttcccccaggtctacatgttcctggtgaaatggcaggacctgtcggagaaggtggtctaccggcgcttcaccgagatctatgagt

SEQ ID NO: 27120 - RNA, 88 nt, synthetic construct
  source 1..88: mol_type = other RNA
gctttcccccaggtttacatgttcctggtgaaatggcaggacctgtcggagaaggtggtctaccggcgcttcaccgagatctacgagt

SEQ ID NO: 27121 - RNA, 88 nt, synthetic construct
  source 1..88: mol_type = other RNA
gctttcccccaggtctacatgttcctggtgaaatggcaggacctgtcggagaaggtggtctaccggcgcttcaccgagatctatgagt

SEQ ID NO: 27122 - RNA, 88 nt, synthetic construct
  source 1..88: mol_type = other RNA
gctttcccccaggtatacatgttcctggtgaaatggcaggacctgtcggagaaggtggtctaccggcgcttcaccgagatctatgagt

SEQ ID NO: 27123 - RNA, 88 nt, synthetic construct
  source 1..88: mol_type = other RNA
gctttcccccaggtctacatgttcctggtgaaatggcaggacctgtcggagaaggtggtctaccggcgcttcaccgagatctacgagt

SEQ ID NO: 27124 - RNA, 88 nt, synthetic construct
  source 1..88: mol_type = other RNA
gctttcccccaggtatacatgttcctggtgaaatggcaggacctgtcggagaaggtggtctaccggcgcttcaccgagatctacgagt

SEQ ID NO: 27125 - RNA, 88 nt, synthetic construct
  source 1..88: mol_type = other RNA
gctttcccccaggtgtacatgttcctggtgaaatggcaggacctgtcggagaaggtggtctaccggcgcttcaccgagatctacgagt

SEQ ID NO: 27126 - RNA, 88 nt, synthetic construct
  source 1..88: mol_type = other RNA
gctttcccccaggtttacatgttcctggtgaaatggcaggacctgtcggagaaggtggtctaccggcgcttcaccgagatctatgagt

SEQ ID NO: 27127 - RNA, 88 nt, synthetic construct
  source 1..88: mol_type = other RNA
gctttcccccaggtgtacatgttcctggtgaaatggcaggacctgtcggagaaggtggtctaccggcgcttcaccgagatctatgagt

SEQ ID NO: 27128 - RNA, 89 nt, synthetic construct
  source 1..89: mol_type = other RNA
ggctttcccccaggtatacatgttcctggtgaaatggcaggacctgtcggagaaggtggtctaccggcgcttcaccgagatctacgagt

SEQ ID NO: 27129 - RNA, 89 nt, synthetic construct
  source 1..89: mol_type = other RNA
ggctttcccccaggtctacatgttcctggtgaaatggcaggacctgtcggagaaggtggtctaccggcgcttcaccgagatctacgagt

SEQ ID NO: 27130 - RNA, 89 nt, synthetic construct
  source 1..89: mol_type = other RNA
ggctttcccccaggtgtacatgttcctggtgaaatggcaggacctgtcggagaaggtggtctaccggcgcttcaccgagatctatgagt

SEQ ID NO: 27131 - RNA, 89 nt, synthetic construct
  source 1..89: mol_type = other RNA
ggctttcccccaggtgtacatgttcctggtgaaatggcaggacctgtcggagaaggtggtctaccggcgcttcaccgagatctacgagt

SEQ ID NO: 27132 - RNA, 89 nt, synthetic construct
  source 1..89: mol_type = other RNA
ggctttcccccaggtatacatgttcctggtgaaatggcaggacctgtcggagaaggtggtctaccggcgcttcaccgagatctatgagt

SEQ ID NO: 27133 - RNA, 89 nt, synthetic construct
  source 1..89: mol_type = other RNA
ggctttcccccaggtctacatgttcctggtgaaatggcaggacctgtcggagaaggtggtctaccggcgcttcaccgagatctatgagt

SEQ ID NO: 27134 - RNA, 89 nt, synthetic construct
  source 1..89: mol_type = other RNA
ggctttcccccaggtttacatgttcctggtgaaatggcaggacctgtcggagaaggtggtctaccggcgcttcaccgagatctatgagt

SEQ ID NO: 27135 - RNA, 89 nt, synthetic construct
  source 1..89: mol_type = other RNA
ggctttcccccaggtttacatgttcctggtgaaatggcaggacctgtcggagaaggtggtctaccggcgcttcaccgagatctacgagt

SEQ ID NO: 27136 - RNA, 90 nt, synthetic construct
  source 1..90: mol_type = other RNA
tggctttcccccaggtatacatgttcctggtgaaatggcaggacctgtcggagaaggtggtctaccggcgcttcaccgagatctacgagt

SEQ ID NO: 27137 - RNA, 90 nt, synthetic construct
  source 1..90: mol_type = other RNA
tggctttcccccaggtctacatgttcctggtgaaatggcaggacctgtcggagaaggtggtctaccggcgcttcaccgagatctatgagt

SEQ ID NO: 27138 - RNA, 90 nt, synthetic construct
  source 1..90: mol_type = other RNA
tggctttcccccaggtatacatgttcctggtgaaatggcaggacctgtcggagaaggtggtctaccggcgcttcaccgagatctatgagt

SEQ ID NO: 27139 - RNA, 90 nt, synthetic construct
  source 1..90: mol_type = other RNA
tggctttcccccaggtctacatgttcctggtgaaatggcaggacctgtcggagaaggtggtctaccggcgcttcaccgagatctacgagt

SEQ ID NO: 27140 - RNA, 90 nt, synthetic construct
  source 1..90: mol_type = other RNA
tggctttcccccaggtttacatgttcctggtgaaatggcaggacctgtcggagaaggtggtctaccggcgcttcaccgagatctacgagt

SEQ ID NO: 27141 - RNA, 90 nt, synthetic construct
  source 1..90: mol_type = other RNA
tggctttcccccaggtgtacatgttcctggtgaaatggcaggacctgtcggagaaggtggtctaccggcgcttcaccgagatctacgagt

SEQ ID NO: 27142 - RNA, 90 nt, synthetic construct
  source 1..90: mol_type = other RNA
tggctttcccccaggtttacatgttcctggtgaaatggcaggacctgtcggagaaggtggtctaccggcgcttcaccgagatctatgagt

SEQ ID NO: 27143 - RNA, 90 nt, synthetic construct
  source 1..90: mol_type = other RNA
tggctttcccccaggtgtacatgttcctggtgaaatggcaggacctgtcggagaaggtggtctaccggcgcttcaccgagatctatgagt

SEQ ID NO: 27144 - RNA, 91 nt, synthetic construct
  source 1..91: mol_type = other RNA
ctggctttcccccaggtgtacatgttcctggtgaaatggcaggacctgtcggagaaggtggtctaccggcgcttcaccgagatctatgagt

SEQ ID NO: 27145 - RNA, 91 nt, synthetic construct
  source 1..91: mol_type = other RNA
ctggctttcccccaggtctacatgttcctggtgaaatggcaggacctgtcggagaaggtggtctaccggcgcttcaccgagatctatgagt

SEQ ID NO: 27146 - RNA, 91 nt, synthetic construct
  source 1..91: mol_type = other RNA
ctggctttcccccaggtatacatgttcctggtgaaatggcaggacctgtcggagaaggtggtctaccggcgcttcaccgagatctacgagt

SEQ ID NO: 27147 - RNA, 91 nt, synthetic construct
  source 1..91: mol_type = other RNA
ctggctttcccccaggtatacatgttcctggtgaaatggcaggacctgtcggagaaggtggtctaccggcgcttcaccgagatctatgagt

SEQ ID NO: 27148 - RNA, 91 nt, synthetic construct
  source 1..91: mol_type = other RNA
ctggctttcccccaggtgtacatgttcctggtgaaatggcaggacctgtcggagaaggtggtctaccggcgcttcaccgagatctacgagt

SEQ ID NO: 27149 - RNA, 91 nt, synthetic construct
  source 1..91: mol_type = other RNA
ctggctttcccccaggtttacatgttcctggtgaaatggcaggacctgtcggagaaggtggtctaccggcgcttcaccgagatctatgagt

SEQ ID NO: 27150 - RNA, 91 nt, synthetic construct
  source 1..91: mol_type = other RNA
ctggctttcccccaggtttacatgttcctggtgaaatggcaggacctgtcggagaaggtggtctaccggcgcttcaccgagatctacgagt

SEQ ID NO: 27151 - RNA, 91 nt, synthetic construct
  source 1..91: mol_type = other RNA
ctggctttcccccaggtctacatgttcctggtgaaatggcaggacctgtcggagaaggtggtctaccggcgcttcaccgagatctacgagt

SEQ ID NO: 27152 - RNA, 92 nt, synthetic construct
  source 1..92: mol_type = other RNA
tctggctttcccccaggtctacatgttcctggtgaaatggcaggacctgtcggagaaggtggtctaccggcgcttcaccgagatctatgagt

SEQ ID NO: 27153 - RNA, 92 nt, synthetic construct
  source 1..92: mol_type = other RNA
tctggctttcccccaggtttacatgttcctggtgaaatggcaggacctgtcggagaaggtggtctaccggcgcttcaccgagatctacgagt

SEQ ID NO: 27154 - RNA, 92 nt, synthetic construct
  source 1..92: mol_type = other RNA
tctggctttcccccaggtgtacatgttcctggtgaaatggcaggacctgtcggagaaggtggtctaccggcgcttcaccgagatctatgagt

SEQ ID NO: 27155 - RNA, 92 nt, synthetic construct
  source 1..92: mol_type = other RNA
tctggctttcccccaggtttacatgttcctggtgaaatggcaggacctgtcggagaaggtggtctaccggcgcttcaccgagatctatgagt

SEQ ID NO: 27156 - RNA, 92 nt, synthetic construct
  source 1..92: mol_type = other RNA
tctggctttcccccaggtctacatgttcctggtgaaatggcaggacctgtcggagaaggtggtctaccggcgcttcaccgagatctacgagt

SEQ ID NO: 27157 - RNA, 92 nt, synthetic construct
  source 1..92: mol_type = other RNA
tctggctttcccccaggtatacatgttcctggtgaaatggcaggacctgtcggagaaggtggtctaccggcgcttcaccgagatctatgagt

SEQ ID NO: 27158 - RNA, 92 nt, synthetic construct
  source 1..92: mol_type = other RNA
tctggctttcccccaggtatacatgttcctggtgaaatggcaggacctgtcggagaaggtggtctaccggcgcttcaccgagatctacgagt

SEQ ID NO: 27159 - RNA, 92 nt, synthetic construct
  source 1..92: mol_type = other RNA
tctggctttcccccaggtgtacatgttcctggtgaaatggcaggacctgtcggagaaggtggtctaccggcgcttcaccgagatctacgagt

SEQ ID NO: 27160 - RNA, 93 nt, synthetic construct
  source 1..93: mol_type = other RNA
ctctggctttcccccaggtctacatgttcctggtgaaatggcaggacctgtcggagaaggtggtctaccggcgcttcaccgagatctacgagt

SEQ ID NO: 27161 - RNA, 93 nt, synthetic construct
  source 1..93: mol_type = other RNA
ctctggctttcccccaggtgtacatgttcctggtgaaatggcaggacctgtcggagaaggtggtctaccggcgcttcaccgagatctacgagt

SEQ ID NO: 27162 - RNA, 93 nt, synthetic construct
  source 1..93: mol_type = other RNA
ctctggctttcccccaggtgtacatgttcctggtgaaatggcaggacctgtcggagaaggtggtctaccggcgcttcaccgagatctatgagt

SEQ ID NO: 27163 - RNA, 93 nt, synthetic construct
  source 1..93: mol_type = other RNA
ctctggctttcccccaggtctacatgttcctggtgaaatggcaggacctgtcggagaaggtggtctaccggcgcttcaccgagatctatgagt

SEQ ID NO: 27164 - RNA, 93 nt, synthetic construct
  source 1..93: mol_type = other RNA
ctctggctttcccccaggtatacatgttcctggtgaaatggcaggacctgtcggagaaggtggtctaccggcgcttcaccgagatctatgagt

SEQ ID NO: 27165 - RNA, 93 nt, synthetic construct
  source 1..93: mol_type = other RNA
ctctggctttcccccaggtttacatgttcctggtgaaatggcaggacctgtcggagaaggtggtctaccggcgcttcaccgagatctatgagt

SEQ ID NO: 27166 - RNA, 93 nt, synthetic construct
  source 1..93: mol_type = other RNA
ctctggctttcccccaggtatacatgttcctggtgaaatggcaggacctgtcggagaaggtggtctaccggcgcttcaccgagatctacgagt

SEQ ID NO: 27167 - RNA, 93 nt, synthetic construct
  source 1..93: mol_type = other RNA
ctctggctttcccccaggtttacatgttcctggtgaaatggcaggacctgtcggagaaggtggtctaccggcgcttcaccgagatctacgagt

SEQ ID NO: 27168 - RNA, 94 nt, synthetic construct
  source 1..94: mol_type = other RNA
actctggctttcccccaggtctacatgttcctggtgaaatggcaggacctgtcggagaaggtggtctaccggcgcttcaccgagatctacgagt

SEQ ID NO: 27169 - RNA, 94 nt, synthetic construct
  source 1..94: mol_type = other RNA
actctggctttcccccaggtgtacatgttcctggtgaaatggcaggacctgtcggagaaggtggtctaccggcgcttcaccgagatctacgagt

SEQ ID NO: 27170 - RNA, 94 nt, synthetic construct
  source 1..94: mol_type = other RNA
actctggctttcccccaggtatacatgttcctggtgaaatggcaggacctgtcggagaaggtggtctaccggcgcttcaccgagatctacgagt

SEQ ID NO: 27171 - RNA, 94 nt, synthetic construct
  source 1..94: mol_type = other RNA
actctggctttcccccaggtatacatgttcctggtgaaatggcaggacctgtcggagaaggtggtctaccggcgcttcaccgagatctatgagt

SEQ ID NO: 27172 - RNA, 94 nt, synthetic construct
  source 1..94: mol_type = other RNA
actctggctttcccccaggtctacatgttcctggtgaaatggcaggacctgtcggagaaggtggtctaccggcgcttcaccgagatctatgagt

SEQ ID NO: 27173 - RNA, 94 nt, synthetic construct
  source 1..94: mol_type = other RNA
actctggctttcccccaggtttacatgttcctggtgaaatggcaggacctgtcggagaaggtggtctaccggcgcttcaccgagatctacgagt

SEQ ID NO: 27174 - RNA, 94 nt, synthetic construct
  source 1..94: mol_type = other RNA
actctggctttcccccaggtttacatgttcctggtgaaatggcaggacctgtcggagaaggtggtctaccggcgcttcaccgagatctatgagt

SEQ ID NO: 27175 - RNA, 94 nt, synthetic construct
  source 1..94: mol_type = other RNA
actctggctttcccccaggtgtacatgttcctggtgaaatggcaggacctgtcggagaaggtggtctaccggcgcttcaccgagatctatgagt

SEQ ID NO: 27176 - RNA, 95 nt, synthetic construct
  source 1..95: mol_type = other RNA
gactctggctttcccccaggtatacatgttcctggtgaaatggcaggacctgtcggagaaggtggtctaccggcgcttcaccgagatctacgagt

SEQ ID NO: 27177 - RNA, 95 nt, synthetic construct
  source 1..95: mol_type = other RNA
gactctggctttcccccaggtgtacatgttcctggtgaaatggcaggacctgtcggagaaggtggtctaccggcgcttcaccgagatctatgagt

SEQ ID NO: 27178 - RNA, 95 nt, synthetic construct
  source 1..95: mol_type = other RNA
gactctggctttcccccaggtttacatgttcctggtgaaatggcaggacctgtcggagaaggtggtctaccggcgcttcaccgagatctatgagt

SEQ ID NO: 27179 - RNA, 95 nt, synthetic construct
  source 1..95: mol_type = other RNA
gactctggctttcccccaggtgtacatgttcctggtgaaatggcaggacctgtcggagaaggtggtctaccggcgcttcaccgagatctacgagt

SEQ ID NO: 27180 - RNA, 95 nt, synthetic construct
  source 1..95: mol_type = other RNA
gactctggctttcccccaggtctacatgttcctggtgaaatggcaggacctgtcggagaaggtggtctaccggcgcttcaccgagatctacgagt

SEQ ID NO: 27181 - RNA, 95 nt, synthetic construct
  source 1..95: mol_type = other RNA
gactctggctttcccccaggtttacatgttcctggtgaaatggcaggacctgtcggagaaggtggtctaccggcgcttcaccgagatctacgagt

SEQ ID NO: 27182 - RNA, 95 nt, synthetic construct
  source 1..95: mol_type = other RNA
gactctggctttcccccaggtatacatgttcctggtgaaatggcaggacctgtcggagaaggtggtctaccggcgcttcaccgagatctatgagt

SEQ ID NO: 27183 - RNA, 95 nt, synthetic construct
  source 1..95: mol_type = other RNA
gactctggctttcccccaggtctacatgttcctggtgaaatggcaggacctgtcggagaaggtggtctaccggcgcttcaccgagatctatgagt

SEQ ID NO: 27184 - RNA, 96 nt, synthetic construct
  source 1..96: mol_type = other RNA
cgactctggctttcccccaggtttacatgttcctggtgaaatggcaggacctgtcggagaaggtggtctaccggcgcttcaccgagatctatgagt

SEQ ID NO: 27185 - RNA, 96 nt, synthetic construct
  source 1..96: mol_type = other RNA
cgactctggctttcccccaggtttacatgttcctggtgaaatggcaggacctgtcggagaaggtggtctaccggcgcttcaccgagatctacgagt

SEQ ID NO: 27186 - RNA, 96 nt, synthetic construct
  source 1..96: mol_type = other RNA
cgactctggctttcccccaggtctacatgttcctggtgaaatggcaggacctgtcggagaaggtggtctaccggcgcttcaccgagatctatgagt

SEQ ID NO: 27187 - RNA, 96 nt, synthetic construct
  source 1..96: mol_type = other RNA
cgactctggctttcccccaggtatacatgttcctggtgaaatggcaggacctgtcggagaaggtggtctaccggcgcttcaccgagatctacgagt

SEQ ID NO: 27188 - RNA, 96 nt, synthetic construct
  source 1..96: mol_type = other RNA
cgactctggctttcccccaggtatacatgttcctggtgaaatggcaggacctgtcggagaaggtggtctaccggcgcttcaccgagatctatgagt

SEQ ID NO: 27189 - RNA, 96 nt, synthetic construct
  source 1..96: mol_type = other RNA
cgactctggctttcccccaggtctacatgttcctggtgaaatggcaggacctgtcggagaaggtggtctaccggcgcttcaccgagatctacgagt

SEQ ID NO: 27190 - RNA, 96 nt, synthetic construct
  source 1..96: mol_type = other RNA
cgactctggctttcccccaggtgtacatgttcctggtgaaatggcaggacctgtcggagaaggtggtctaccggcgcttcaccgagatctacgagt

SEQ ID NO: 27191 - RNA, 96 nt, synthetic construct
  source 1..96: mol_type = other RNA
cgactctggctttcccccaggtgtacatgttcctggtgaaatggcaggacctgtcggagaaggtggtctaccggcgcttcaccgagatctatgagt

SEQ ID NO: 27192 - RNA, 97 nt, synthetic construct
  source 1..97: mol_type = other RNA
ccgactctggctttcccccaggtttacatgttcctggtgaaatggcaggacctgtcggagaaggtggtctaccggcgcttcaccgagatctacgagt

SEQ ID NO: 27193 - RNA, 97 nt, synthetic construct
  source 1..97: mol_type = other RNA
ccgactctggctttcccccaggtctacatgttcctggtgaaatggcaggacctgtcggagaaggtggtctaccggcgcttcaccgagatctatgagt

SEQ ID NO: 27194 - RNA, 97 nt, synthetic construct
  source 1..97: mol_type = other RNA
ccgactctggctttcccccaggtgtacatgttcctggtgaaatggcaggacctgtcggagaaggtggtctaccggcgcttcaccgagatctatgagt

SEQ ID NO: 27195 - RNA, 97 nt, synthetic construct
  source 1..97: mol_type = other RNA
ccgactctggctttcccccaggtgtacatgttcctggtgaaatggcaggacctgtcggagaaggtggtctaccggcgcttcaccgagatctacgagt

SEQ ID NO: 27196 - RNA, 97 nt, synthetic construct
  source 1..97: mol_type = other RNA
ccgactctggctttcccccaggtttacatgttcctggtgaaatggcaggacctgtcggagaaggtggtctaccggcgcttcaccgagatctatgagt

SEQ ID NO: 27197 - RNA, 97 nt, synthetic construct
  source 1..97: mol_type = other RNA
ccgactctggctttcccccaggtatacatgttcctggtgaaatggcaggacctgtcggagaaggtggtctaccggcgcttcaccgagatctatgagt

SEQ ID NO: 27198 - RNA, 97 nt, synthetic construct
  source 1..97: mol_type = other RNA
ccgactctggctttcccccaggtatacatgttcctggtgaaatggcaggacctgtcggagaaggtggtctaccggcgcttcaccgagatctacgagt

SEQ ID NO: 27199 - RNA, 97 nt, synthetic construct
  source 1..97: mol_type = other RNA
ccgactctggctttcccccaggtctacatgttcctggtgaaatggcaggacctgtcggagaaggtggtctaccggcgcttcaccgagatctacgagt

SEQ ID NO: 27200 - RNA, 98 nt, synthetic construct
  source 1..98: mol_type = other RNA
cccgactctggctttcccccaggtttacatgttcctggtgaaatggcaggacctgtcggagaaggtggtctaccggcgcttcaccgagatctatgagt

SEQ ID NO: 27201 - RNA, 98 nt, synthetic construct
  source 1..98: mol_type = other RNA
cccgactctggctttcccccaggtctacatgttcctggtgaaatggcaggacctgtcggagaaggtggtctaccggcgcttcaccgagatctatgagt

SEQ ID NO: 27202 - RNA, 98 nt, synthetic construct
  source 1..98: mol_type = other RNA
cccgactctggctttcccccaggtatacatgttcctggtgaaatggcaggacctgtcggagaaggtggtctaccggcgcttcaccgagatctatgagt

SEQ ID NO: 27203 - RNA, 98 nt, synthetic construct
  source 1..98: mol_type = other RNA
cccgactctggctttcccccaggtatacatgttcctggtgaaatggcaggacctgtcggagaaggtggtctaccggcgcttcaccgagatctacgagt

SEQ ID NO: 27204 - RNA, 98 nt, synthetic construct
  source 1..98: mol_type = other RNA
cccgactctggctttcccccaggtgtacatgttcctggtgaaatggcaggacctgtcggagaaggtggtctaccggcgcttcaccgagatctatgagt

SEQ ID NO: 27205 - RNA, 98 nt, synthetic construct
  source 1..98: mol_type = other RNA
cccgactctggctttcccccaggtgtacatgttcctggtgaaatggcaggacctgtcggagaaggtggtctaccggcgcttcaccgagatctacgagt

SEQ ID NO: 27206 - RNA, 98 nt, synthetic construct
  source 1..98: mol_type = other RNA
cccgactctggctttcccccaggtttacatgttcctggtgaaatggcaggacctgtcggagaaggtggtctaccggcgcttcaccgagatctacgagt

SEQ ID NO: 27207 - RNA, 98 nt, synthetic construct
  source 1..98: mol_type = other RNA
cccgactctggctttcccccaggtctacatgttcctggtgaaatggcaggacctgtcggagaaggtggtctaccggcgcttcaccgagatctacgagt

SEQ ID NO: 27208 - RNA, 99 nt, synthetic construct
  source 1..99: mol_type = other RNA
ccccgactctggctttcccccaggtttacatgttcctggtgaaatggcaggacctgtcggagaaggtggtctaccggcgcttcaccgagatctatgagt

SEQ ID NO: 27209 - RNA, 99 nt, synthetic construct
  source 1..99: mol_type = other RNA
ccccgactctggctttcccccaggtttacatgttcctggtgaaatggcaggacctgtcggagaaggtggtctaccggcgcttcaccgagatctacgagt

SEQ ID NO: 27210 - RNA, 99 nt, synthetic construct
  source 1..99: mol_type = other RNA
ccccgactctggctttcccccaggtctacatgttcctggtgaaatggcaggacctgtcggagaaggtggtctaccggcgcttcaccgagatctatgagt

SEQ ID NO: 27211 - RNA, 99 nt, synthetic construct
  source 1..99: mol_type = other RNA
ccccgactctggctttcccccaggtgtacatgttcctggtgaaatggcaggacctgtcggagaaggtggtctaccggcgcttcaccgagatctacgagt

SEQ ID NO: 27212 - RNA, 99 nt, synthetic construct
  source 1..99: mol_type = other RNA
ccccgactctggctttcccccaggtgtacatgttcctggtgaaatggcaggacctgtcggagaaggtggtctaccggcgcttcaccgagatctatgagt

SEQ ID NO: 27213 - RNA, 99 nt, synthetic construct
  source 1..99: mol_type = other RNA
ccccgactctggctttcccccaggtatacatgttcctggtgaaatggcaggacctgtcggagaaggtggtctaccggcgcttcaccgagatctacgagt

SEQ ID NO: 27214 - RNA, 99 nt, synthetic construct
  source 1..99: mol_type = other RNA
ccccgactctggctttcccccaggtatacatgttcctggtgaaatggcaggacctgtcggagaaggtggtctaccggcgcttcaccgagatctatgagt

SEQ ID NO: 27215 - RNA, 99 nt, synthetic construct
  source 1..99: mol_type = other RNA
ccccgactctggctttcccccaggtctacatgttcctggtgaaatggcaggacctgtcggagaaggtggtctaccggcgcttcaccgagatctacgagt

SEQ ID NO: 27216 - RNA, 100 nt, synthetic construct
  source 1..100: mol_type = other RNA
cccccgactctggctttcccccaggtatacatgttcctggtgaaatggcaggacctgtcggagaaggtggtctaccggcgcttcaccgagatctatgagt

SEQ ID NO: 27217 - RNA, 100 nt, synthetic construct
  source 1..100: mol_type = other RNA
cccccgactctggctttcccccaggtatacatgttcctggtgaaatggcaggacctgtcggagaaggtggtctaccggcgcttcaccgagatctacgagt

SEQ ID NO: 27218 - RNA, 100 nt, synthetic construct
  source 1..100: mol_type = other RNA
cccccgactctggctttcccccaggtctacatgttcctggtgaaatggcaggacctgtcggagaaggtggtctaccggcgcttcaccgagatctatgagt

SEQ ID NO: 27219 - RNA, 100 nt, synthetic construct
  source 1..100: mol_type = other RNA
cccccgactctggctttcccccaggtctacatgttcctggtgaaatggcaggacctgtcggagaaggtggtctaccggcgcttcaccgagatctacgagt

SEQ ID NO: 27220 - RNA, 100 nt, synthetic construct
  source 1..100: mol_type = other RNA
cccccgactctggctttcccccaggtttacatgttcctggtgaaatggcaggacctgtcggagaaggtggtctaccggcgcttcaccgagatctacgagt

SEQ ID NO: 27221 - RNA, 100 nt, synthetic construct
  source 1..100: mol_type = other RNA
cccccgactctggctttcccccaggtgtacatgttcctggtgaaatggcaggacctgtcggagaaggtggtctaccggcgcttcaccgagatctatgagt

SEQ ID NO: 27222 - RNA, 100 nt, synthetic construct
  source 1..100: mol_type = other RNA
cccccgactctggctttcccccaggtttacatgttcctggtgaaatggcaggacctgtcggagaaggtggtctaccggcgcttcaccgagatctatgagt

SEQ ID NO: 27223 - RNA, 100 nt, synthetic construct
  source 1..100: mol_type = other RNA
cccccgactctggctttcccccaggtgtacatgttcctggtgaaatggcaggacctgtcggagaaggtggtctaccggcgcttcaccgagatctacgagt

SEQ ID NO: 27224 - RNA, 101 nt, synthetic construct
  source 1..101: mol_type = other RNA
tcccccgactctggctttcccccaggtctacatgttcctggtgaaatggcaggacctgtcggagaaggtggtctaccggcgcttcaccgagatctatgagt

SEQ ID NO: 27225 - RNA, 101 nt, synthetic construct
  source 1..101: mol_type = other RNA
tcccccgactctggctttcccccaggtatacatgttcctggtgaaatggcaggacctgtcggagaaggtggtctaccggcgcttcaccgagatctatgagt

SEQ ID NO: 27226 - RNA, 101 nt, synthetic construct
  source 1..101: mol_type = other RNA
tcccccgactctggctttcccccaggtctacatgttcctggtgaaatggcaggacctgtcggagaaggtggtctaccggcgcttcaccgagatctacgagt

SEQ ID NO: 27227 - RNA, 101 nt, synthetic construct
  source 1..101: mol_type = other RNA
tcccccgactctggctttcccccaggtatacatgttcctggtgaaatggcaggacctgtcggagaaggtggtctaccggcgcttcaccgagatctacgagt

SEQ ID NO: 27228 - RNA, 101 nt, synthetic construct
  source 1..101: mol_type = other RNA
tcccccgactctggctttcccccaggtgtacatgttcctggtgaaatggcaggacctgtcggagaaggtggtctaccggcgcttcaccgagatctacgagt

SEQ ID NO: 27229 - RNA, 101 nt, synthetic construct
  source 1..101: mol_type = other RNA
tcccccgactctggctttcccccaggtgtacatgttcctggtgaaatggcaggacctgtcggagaaggtggtctaccggcgcttcaccgagatctatgagt

SEQ ID NO: 27230 - RNA, 101 nt, synthetic construct
  source 1..101: mol_type = other RNA
tcccccgactctggctttcccccaggtttacatgttcctggtgaaatggcaggacctgtcggagaaggtggtctaccggcgcttcaccgagatctacgagt

SEQ ID NO: 27231 - RNA, 101 nt, synthetic construct
  source 1..101: mol_type = other RNA
tcccccgactctggctttcccccaggtttacatgttcctggtgaaatggcaggacctgtcggagaaggtggtctaccggcgcttcaccgagatctatgagt

SEQ ID NO: 27232 - RNA, 102 nt, synthetic construct
  source 1..102: mol_type = other RNA
gtcccccgactctggctttcccccaggtttacatgttcctggtgaaatggcaggacctgtcggagaaggtggtctaccggcgcttcaccgagatctatgagt

SEQ ID NO: 27233 - RNA, 102 nt, synthetic construct
  source 1..102: mol_type = other RNA
gtcccccgactctggctttcccccaggtttacatgttcctggtgaaatggcaggacctgtcggagaaggtggtctaccggcgcttcaccgagatctacgagt

SEQ ID NO: 27234 - RNA, 102 nt, synthetic construct
  source 1..102: mol_type = other RNA
gtcccccgactctggctttcccccaggtgtacatgttcctggtgaaatggcaggacctgtcggagaaggtggtctaccggcgcttcaccgagatctacgagt

SEQ ID NO: 27235 - RNA, 102 nt, synthetic construct
  source 1..102: mol_type = other RNA
gtcccccgactctggctttcccccaggtgtacatgttcctggtgaaatggcaggacctgtcggagaaggtggtctaccggcgcttcaccgagatctatgagt

SEQ ID NO: 27236 - RNA, 102 nt, synthetic construct
  source 1..102: mol_type = other RNA
gtcccccgactctggctttcccccaggtctacatgttcctggtgaaatggcaggacctgtcggagaaggtggtctaccggcgcttcaccgagatctacgagt

SEQ ID NO: 27237 - RNA, 102 nt, synthetic construct
  source 1..102: mol_type = other RNA
gtcccccgactctggctttcccccaggtatacatgttcctggtgaaatggcaggacctgtcggagaaggtggtctaccggcgcttcaccgagatctatgagt

SEQ ID NO: 27238 - RNA, 102 nt, synthetic construct
  source 1..102: mol_type = other RNA
gtcccccgactctggctttcccccaggtatacatgttcctggtgaaatggcaggacctgtcggagaaggtggtctaccggcgcttcaccgagatctacgagt

SEQ ID NO: 27239 - RNA, 102 nt, synthetic construct
  source 1..102: mol_type = other RNA
gtcccccgactctggctttcccccaggtctacatgttcctggtgaaatggcaggacctgtcggagaaggtggtctaccggcgcttcaccgagatctatgagt

SEQ ID NO: 27240 - RNA, 103 nt, synthetic construct
  source 1..103: mol_type = other RNA
ggtcccccgactctggctttcccccaggtttacatgttcctggtgaaatggcaggacctgtcggagaaggtggtctaccggcgcttcaccgagatctatgagt

SEQ ID NO: 27241 - RNA, 103 nt, synthetic construct
  source 1..103: mol_type = other RNA
ggtcccccgactctggctttcccccaggtgtacatgttcctggtgaaatggcaggacctgtcggagaaggtggtctaccggcgcttcaccgagatctatgagt

SEQ ID NO: 27242 - RNA, 103 nt, synthetic construct
  source 1..103: mol_type = other RNA
ggtcccccgactctggctttcccccaggtgtacatgttcctggtgaaatggcaggacctgtcggagaaggtggtctaccggcgcttcaccgagatctacgagt

SEQ ID NO: 27243 - RNA, 103 nt, synthetic construct
  source 1..103: mol_type = other RNA
ggtcccccgactctggctttcccccaggtctacatgttcctggtgaaatggcaggacctgtcggagaaggtggtctaccggcgcttcaccgagatctatgagt

SEQ ID NO: 27244 - RNA, 103 nt, synthetic construct
  source 1..103: mol_type = other RNA
ggtcccccgactctggctttcccccaggtatacatgttcctggtgaaatggcaggacctgtcggagaaggtggtctaccggcgcttcaccgagatctatgagt

SEQ ID NO: 27245 - RNA, 103 nt, synthetic construct
  source 1..103: mol_type = other RNA
ggtcccccgactctggctttcccccaggtatacatgttcctggtgaaatggcaggacctgtcggagaaggtggtctaccggcgcttcaccgagatctacgagt

SEQ ID NO: 27246 - RNA, 103 nt, synthetic construct
  source 1..103: mol_type = other RNA
ggtcccccgactctggctttcccccaggtttacatgttcctggtgaaatggcaggacctgtcggagaaggtggtctaccggcgcttcaccgagatctacgagt

SEQ ID NO: 27247 - RNA, 103 nt, synthetic construct
  source 1..103: mol_type = other RNA
ggtcccccgactctggctttcccccaggtctacatgttcctggtgaaatggcaggacctgtcggagaaggtggtctaccggcgcttcaccgagatctacgagt

SEQ ID NO: 27248 - RNA, 20 nt, synthetic construct
  source 1..20: mol_type = other RNA
gcgcttcaccgagatctatg

SEQ ID NO: 27249 - RNA, 16 nt, synthetic construct
  source 1..16: mol_type = other RNA
tgggcttcctccagtg

SEQ ID NO: 27250 - RNA, 17 nt, synthetic construct
  source 1..17: mol_type = other RNA
ctgggcttcctccagtg

SEQ ID NO: 27251 - RNA, 18 nt, synthetic construct
  source 1..18: mol_type = other RNA
tctgggcttcctccagtg

SEQ ID NO: 27252 - RNA, 19 nt, synthetic construct
  source 1..19: mol_type = other RNA
ctctgggcttcctccagtg

SEQ ID NO: 27253 - RNA, 20 nt, synthetic construct
  source 1..20: mol_type = other RNA
cctctgggcttcctccagtg

SEQ ID NO: 27254 - RNA, 21 nt, synthetic construct
  source 1..21: mol_type = other RNA
tcctctgggcttcctccagtg

SEQ ID NO: 27255 - RNA, 22 nt, synthetic construct
  source 1..22: mol_type = other RNA
atcctctgggcttcctccagtg

SEQ ID NO: 27256-27262 - skipped (7 entries)

SEQ ID NO: 27263 - RNA, 10 nt, synthetic construct
  source 1..10: mol_type = other RNA
tggaggaagc

SEQ ID NO: 27264 - RNA, 11 nt, synthetic construct
  source 1..11: mol_type = other RNA
tggaggaagcc

SEQ ID NO: 27265 - RNA, 12 nt, synthetic construct
  source 1..12: mol_type = other RNA
tggaggaagccc

SEQ ID NO: 27266 - RNA, 13 nt, synthetic construct
  source 1..13: mol_type = other RNA
tggaggaagccca

SEQ ID NO: 27267 - RNA, 14 nt, synthetic construct
  source 1..14: mol_type = other RNA
tggaggaagcccag

SEQ ID NO: 27268 - RNA, 15 nt, synthetic construct
  source 1..15: mol_type = other RNA
tggaggaagcccaga

SEQ ID NO: 27269 - RNA, 16 nt, synthetic construct
  source 1..16: mol_type = other RNA
tggaggaagcccagag

SEQ ID NO: 27270 - RNA, 17 nt, synthetic construct
  source 1..17: mol_type = other RNA
tggaggaagcccagagg

SEQ ID NO: 27271 - RNA, 18 nt, synthetic construct
  source 1..18: mol_type = other RNA
tggaggaagcccagagga

SEQ ID NO: 27272 - RNA, 19 nt, synthetic construct
  source 1..19: mol_type = other RNA
tggaggaagcccagaggat

SEQ ID NO: 27273 - RNA, 83 nt, synthetic construct
  source 1..83: mol_type = other RNA
acctgggggaaagccagagtcgggggaccccattcagcctccaaagaggctttgctgtgtgcacccaggatcccactacccac

SEQ ID NO: 27274 - RNA, 84 nt, synthetic construct
  source 1..84: mol_type = other RNA
aacctgggggaaagccagagtcgggggaccccattcagcctccaaagaggctttgctgtgtgcacccaggatcccactacccac

SEQ ID NO: 27275 - RNA, 84 nt, synthetic construct
  source 1..84: mol_type = other RNA
cacctgggggaaagccagagtcgggggaccccattcagcctccaaagaggctttgctgtgtgcacccaggatcccactacccac

SEQ ID NO: 27276 - RNA, 84 nt, synthetic construct
  source 1..84: mol_type = other RNA
tacctgggggaaagccagagtcgggggaccccattcagcctccaaagaggctttgctgtgtgcacccaggatcccactacccac

SEQ ID NO: 27277 - RNA, 84 nt, synthetic construct
  source 1..84: mol_type = other RNA
gacctgggggaaagccagagtcgggggaccccattcagcctccaaagaggctttgctgtgtgcacccaggatcccactacccac

SEQ ID NO: 27278 - RNA, 85 nt, synthetic construct
  source 1..85: mol_type = other RNA
aaacctgggggaaagccagagtcgggggaccccattcagcctccaaagaggctttgctgtgtgcacccaggatcccactacccac

SEQ ID NO: 27279 - RNA, 85 nt, synthetic construct
  source 1..85: mol_type = other RNA
agacctgggggaaagccagagtcgggggaccccattcagcctccaaagaggctttgctgtgtgcacccaggatcccactacccac

SEQ ID NO: 27280 - RNA, 85 nt, synthetic construct
  source 1..85: mol_type = other RNA
acacctgggggaaagccagagtcgggggaccccattcagcctccaaagaggctttgctgtgtgcacccaggatcccactacccac

SEQ ID NO: 27281 - RNA, 85 nt, synthetic construct
  source 1..85: mol_type = other RNA
atacctgggggaaagccagagtcgggggaccccattcagcctccaaagaggctttgctgtgtgcacccaggatcccactacccac

SEQ ID NO: 27282 - RNA, 86 nt, synthetic construct
  source 1..86: mol_type = other RNA
tagacctgggggaaagccagagtcgggggaccccattcagcctccaaagaggctttgctgtgtgcacccaggatcccactacccac

SEQ ID NO: 27283 - RNA, 86 nt, synthetic construct
  source 1..86: mol_type = other RNA
tatacctgggggaaagccagagtcgggggaccccattcagcctccaaagaggctttgctgtgtgcacccaggatcccactacccac

SEQ ID NO: 27284 - RNA, 86 nt, synthetic construct
  source 1..86: mol_type = other RNA
taaacctgggggaaagccagagtcgggggaccccattcagcctccaaagaggctttgctgtgtgcacccaggatcccactacccac

SEQ ID NO: 27285 - RNA, 86 nt, synthetic construct
  source 1..86: mol_type = other RNA
tacacctgggggaaagccagagtcgggggaccccattcagcctccaaagaggctttgctgtgtgcacccaggatcccactacccac

SEQ ID NO: 27286 - RNA, 87 nt, synthetic construct
  source 1..87: mol_type = other RNA
gtatacctgggggaaagccagagtcgggggaccccattcagcctccaaagaggctttgctgtgtgcacccaggatcccactacccac

SEQ ID NO: 27287 - RNA, 87 nt, synthetic construct
  source 1..87: mol_type = other RNA
gtaaacctgggggaaagccagagtcgggggaccccattcagcctccaaagaggctttgctgtgtgcacccaggatcccactacccac

SEQ ID NO: 27288 - RNA, 87 nt, synthetic construct
  source 1..87: mol_type = other RNA
gtagacctgggggaaagccagagtcgggggaccccattcagcctccaaagaggctttgctgtgtgcacccaggatcccactacccac

SEQ ID NO: 27289 - RNA, 87 nt, synthetic construct
  source 1..87: mol_type = other RNA
gtacacctgggggaaagccagagtcgggggaccccattcagcctccaaagaggctttgctgtgtgcacccaggatcccactacccac

SEQ ID NO: 27290 - RNA, 88 nt, synthetic construct
  source 1..88: mol_type = other RNA
tgtaaacctgggggaaagccagagtcgggggaccccattcagcctccaaagaggctttgctgtgtgcacccaggatcccactacccac

SEQ ID NO: 27291 - RNA, 88 nt, synthetic construct
  source 1..88: mol_type = other RNA
tgtacacctgggggaaagccagagtcgggggaccccattcagcctccaaagaggctttgctgtgtgcacccaggatcccactacccac

SEQ ID NO: 27292 - RNA, 88 nt, synthetic construct
  source 1..88: mol_type = other RNA
tgtatacctgggggaaagccagagtcgggggaccccattcagcctccaaagaggctttgctgtgtgcacccaggatcccactacccac

SEQ ID NO: 27293 - RNA, 88 nt, synthetic construct
  source 1..88: mol_type = other RNA
tgtagacctgggggaaagccagagtcgggggaccccattcagcctccaaagaggctttgctgtgtgcacccaggatcccactacccac

SEQ ID NO: 27294 - RNA, 89 nt, synthetic construct
  source 1..89: mol_type = other RNA
atgtaaacctgggggaaagccagagtcgggggaccccattcagcctccaaagaggctttgctgtgtgcacccaggatcccactacccac

SEQ ID NO: 27295 - RNA, 89 nt, synthetic construct
  source 1..89: mol_type = other RNA
atgtagacctgggggaaagccagagtcgggggaccccattcagcctccaaagaggctttgctgtgtgcacccaggatcccactacccac

SEQ ID NO: 27296 - RNA, 89 nt, synthetic construct
  source 1..89: mol_type = other RNA
atgtacacctgggggaaagccagagtcgggggaccccattcagcctccaaagaggctttgctgtgtgcacccaggatcccactacccac

SEQ ID NO: 27297 - RNA, 89 nt, synthetic construct
  source 1..89: mol_type = other RNA
atgtatacctgggggaaagccagagtcgggggaccccattcagcctccaaagaggctttgctgtgtgcacccaggatcccactacccac

SEQ ID NO: 27298 - RNA, 90 nt, synthetic construct
  source 1..90: mol_type = other RNA
catgtacacctgggggaaagccagagtcgggggaccccattcagcctccaaagaggctttgctgtgtgcacccaggatcccactacccac

SEQ ID NO: 27299 - RNA, 90 nt, synthetic construct
  source 1..90: mol_type = other RNA
catgtatacctgggggaaagccagagtcgggggaccccattcagcctccaaagaggctttgctgtgtgcacccaggatcccactacccac

SEQ ID NO: 27300 - RNA, 90 nt, synthetic construct
  source 1..90: mol_type = other RNA
catgtagacctgggggaaagccagagtcgggggaccccattcagcctccaaagaggctttgctgtgtgcacccaggatcccactacccac

SEQ ID NO: 27301 - RNA, 90 nt, synthetic construct
  source 1..90: mol_type = other RNA
catgtaaacctgggggaaagccagagtcgggggaccccattcagcctccaaagaggctttgctgtgtgcacccaggatcccactacccac

SEQ ID NO: 27302 - RNA, 91 nt, synthetic construct
  source 1..91: mol_type = other RNA
acatgtatacctgggggaaagccagagtcgggggaccccattcagcctccaaagaggctttgctgtgtgcacccaggatcccactacccac

SEQ ID NO: 27303 - RNA, 91 nt, synthetic construct
  source 1..91: mol_type = other RNA
acatgtagacctgggggaaagccagagtcgggggaccccattcagcctccaaagaggctttgctgtgtgcacccaggatcccactacccac

SEQ ID NO: 27304 - RNA, 91 nt, synthetic construct
  source 1..91: mol_type = other RNA
acatgtaaacctgggggaaagccagagtcgggggaccccattcagcctccaaagaggctttgctgtgtgcacccaggatcccactacccac

SEQ ID NO: 27305 - RNA, 91 nt, synthetic construct
  source 1..91: mol_type = other RNA
acatgtacacctgggggaaagccagagtcgggggaccccattcagcctccaaagaggctttgctgtgtgcacccaggatcccactacccac

SEQ ID NO: 27306 - RNA, 92 nt, synthetic construct
  source 1..92: mol_type = other RNA
aacatgtatacctgggggaaagccagagtcgggggaccccattcagcctccaaagaggctttgctgtgtgcacccaggatcccactacccac

SEQ ID NO: 27307 - RNA, 92 nt, synthetic construct
  source 1..92: mol_type = other RNA
aacatgtagacctgggggaaagccagagtcgggggaccccattcagcctccaaagaggctttgctgtgtgcacccaggatcccactacccac

SEQ ID NO: 27308 - RNA, 92 nt, synthetic construct
  source 1..92: mol_type = other RNA
aacatgtaaacctgggggaaagccagagtcgggggaccccattcagcctccaaagaggctttgctgtgtgcacccaggatcccactacccac

SEQ ID NO: 27309 - RNA, 92 nt, synthetic construct
  source 1..92: mol_type = other RNA
aacatgtacacctgggggaaagccagagtcgggggaccccattcagcctccaaagaggctttgctgtgtgcacccaggatcccactacccac

SEQ ID NO: 27310 - RNA, 93 nt, synthetic construct
  source 1..93: mol_type = other RNA
gaacatgtatacctgggggaaagccagagtcgggggaccccattcagcctccaaagaggctttgctgtgtgcacccaggatcccactacccac

SEQ ID NO: 27311 - RNA, 93 nt, synthetic construct
  source 1..93: mol_type = other RNA
gaacatgtagacctgggggaaagccagagtcgggggaccccattcagcctccaaagaggctttgctgtgtgcacccaggatcccactacccac

SEQ ID NO: 27312 - RNA, 93 nt, synthetic construct
  source 1..93: mol_type = other RNA
gaacatgtacacctgggggaaagccagagtcgggggaccccattcagcctccaaagaggctttgctgtgtgcacccaggatcccactacccac

SEQ ID NO: 27313 - RNA, 93 nt, synthetic construct
  source 1..93: mol_type = other RNA
gaacatgtaaacctgggggaaagccagagtcgggggaccccattcagcctccaaagaggctttgctgtgtgcacccaggatcccactacccac

SEQ ID NO: 27314 - RNA, 94 nt, synthetic construct
  source 1..94: mol_type = other RNA
ggaacatgtaaacctgggggaaagccagagtcgggggaccccattcagcctccaaagaggctttgctgtgtgcacccaggatcccactacccac

SEQ ID NO: 27315 - RNA, 94 nt, synthetic construct
  source 1..94: mol_type = other RNA
ggaacatgtagacctgggggaaagccagagtcgggggaccccattcagcctccaaagaggctttgctgtgtgcacccaggatcccactacccac

SEQ ID NO: 27316 - RNA, 94 nt, synthetic construct
  source 1..94: mol_type = other RNA
ggaacatgtatacctgggggaaagccagagtcgggggaccccattcagcctccaaagaggctttgctgtgtgcacccaggatcccactacccac

SEQ ID NO: 27317 - RNA, 94 nt, synthetic construct
  source 1..94: mol_type = other RNA
ggaacatgtacacctgggggaaagccagagtcgggggaccccattcagcctccaaagaggctttgctgtgtgcacccaggatcccactacccac

SEQ ID NO: 27318 - RNA, 95 nt, synthetic construct
  source 1..95: mol_type = other RNA
aggaacatgtacacctgggggaaagccagagtcgggggaccccattcagcctccaaagaggctttgctgtgtgcacccaggatcccactacccac

SEQ ID NO: 27319 - RNA, 95 nt, synthetic construct
  source 1..95: mol_type = other RNA
aggaacatgtagacctgggggaaagccagagtcgggggaccccattcagcctccaaagaggctttgctgtgtgcacccaggatcccactacccac

SEQ ID NO: 27320 - RNA, 95 nt, synthetic construct
  source 1..95: mol_type = other RNA
aggaacatgtaaacctgggggaaagccagagtcgggggaccccattcagcctccaaagaggctttgctgtgtgcacccaggatcccactacccac

SEQ ID NO: 27321 - RNA, 95 nt, synthetic construct
  source 1..95: mol_type = other RNA
aggaacatgtatacctgggggaaagccagagtcgggggaccccattcagcctccaaagaggctttgctgtgtgcacccaggatcccactacccac

SEQ ID NO: 27322 - RNA, 96 nt, synthetic construct
  source 1..96: mol_type = other RNA
caggaacatgtacacctgggggaaagccagagtcgggggaccccattcagcctccaaagaggctttgctgtgtgcacccaggatcccactacccac

SEQ ID NO: 27323 - RNA, 96 nt, synthetic construct
  source 1..96: mol_type = other RNA
caggaacatgtaaacctgggggaaagccagagtcgggggaccccattcagcctccaaagaggctttgctgtgtgcacccaggatcccactacccac

SEQ ID NO: 27324 - RNA, 96 nt, synthetic construct
  source 1..96: mol_type = other RNA
caggaacatgtagacctgggggaaagccagagtcgggggaccccattcagcctccaaagaggctttgctgtgtgcacccaggatcccactacccac

SEQ ID NO: 27325 - RNA, 96 nt, synthetic construct
  source 1..96: mol_type = other RNA
caggaacatgtatacctgggggaaagccagagtcgggggaccccattcagcctccaaagaggctttgctgtgtgcacccaggatcccactacccac

SEQ ID NO: 27326 - RNA, 97 nt, synthetic construct
  source 1..97: mol_type = other RNA
ccaggaacatgtagacctgggggaaagccagagtcgggggaccccattcagcctccaaagaggctttgctgtgtgcacccaggatcccactacccac

SEQ ID NO: 27327 - RNA, 97 nt, synthetic construct
  source 1..97: mol_type = other RNA
ccaggaacatgtacacctgggggaaagccagagtcgggggaccccattcagcctccaaagaggctttgctgtgtgcacccaggatcccactacccac

SEQ ID NO: 27328 - RNA, 97 nt, synthetic construct
  source 1..97: mol_type = other RNA
ccaggaacatgtatacctgggggaaagccagagtcgggggaccccattcagcctccaaagaggctttgctgtgtgcacccaggatcccactacccac

SEQ ID NO: 27329 - RNA, 97 nt, synthetic construct
  source 1..97: mol_type = other RNA
ccaggaacatgtaaacctgggggaaagccagagtcgggggaccccattcagcctccaaagaggctttgctgtgtgcacccaggatcccactacccac

SEQ ID NO: 27330 - RNA, 98 nt, synthetic construct
  source 1..98: mol_type = other RNA
accaggaacatgtagacctgggggaaagccagagtcgggggaccccattcagcctccaaagaggctttgctgtgtgcacccaggatcccactacccac

SEQ ID NO: 27331 - RNA, 98 nt, synthetic construct
  source 1..98: mol_type = other RNA
accaggaacatgtatacctgggggaaagccagagtcgggggaccccattcagcctccaaagaggctttgctgtgtgcacccaggatcccactacccac

SEQ ID NO: 27332 - RNA, 98 nt, synthetic construct
  source 1..98: mol_type = other RNA
accaggaacatgtacacctgggggaaagccagagtcgggggaccccattcagcctccaaagaggctttgctgtgtgcacccaggatcccactacccac

SEQ ID NO: 27333 - RNA, 98 nt, synthetic construct
  source 1..98: mol_type = other RNA
accaggaacatgtaaacctgggggaaagccagagtcgggggaccccattcagcctccaaagaggctttgctgtgtgcacccaggatcccactacccac

SEQ ID NO: 27334 - RNA, 99 nt, synthetic construct
  source 1..99: mol_type = other RNA
caccaggaacatgtatacctgggggaaagccagagtcgggggaccccattcagcctccaaagaggctttgctgtgtgcacccaggatcccactacccac

SEQ ID NO: 27335 - RNA, 99 nt, synthetic construct
  source 1..99: mol_type = other RNA
caccaggaacatgtagacctgggggaaagccagagtcgggggaccccattcagcctccaaagaggctttgctgtgtgcacccaggatcccactacccac

SEQ ID NO: 27336 - RNA, 99 nt, synthetic construct
  source 1..99: mol_type = other RNA
caccaggaacatgtacacctgggggaaagccagagtcgggggaccccattcagcctccaaagaggctttgctgtgtgcacccaggatcccactacccac

SEQ ID NO: 27337 - RNA, 99 nt, synthetic construct
  source 1..99: mol_type = other RNA
caccaggaacatgtaaacctgggggaaagccagagtcgggggaccccattcagcctccaaagaggctttgctgtgtgcacccaggatcccactacccac

SEQ ID NO: 27338 - RNA, 100 nt, synthetic construct
  source 1..100: mol_type = other RNA
tcaccaggaacatgtagacctgggggaaagccagagtcgggggaccccattcagcctccaaagaggctttgctgtgtgcacccaggatcccactacccac

SEQ ID NO: 27339 - RNA, 100 nt, synthetic construct
  source 1..100: mol_type = other RNA
tcaccaggaacatgtacacctgggggaaagccagagtcgggggaccccattcagcctccaaagaggctttgctgtgtgcacccaggatcccactacccac

SEQ ID NO: 27340 - RNA, 100 nt, synthetic construct
  source 1..100: mol_type = other RNA
tcaccaggaacatgtaaacctgggggaaagccagagtcgggggaccccattcagcctccaaagaggctttgctgtgtgcacccaggatcccactacccac

SEQ ID NO: 27341 - RNA, 100 nt, synthetic construct
  source 1..100: mol_type = other RNA
tcaccaggaacatgtatacctgggggaaagccagagtcgggggaccccattcagcctccaaagaggctttgctgtgtgcacccaggatcccactacccac

SEQ ID NO: 27342 - RNA, 101 nt, synthetic construct
  source 1..101: mol_type = other RNA
ttcaccaggaacatgtatacctgggggaaagccagagtcgggggaccccattcagcctccaaagaggctttgctgtgtgcacccaggatcccactacccac

SEQ ID NO: 27343 - RNA, 101 nt, synthetic construct
  source 1..101: mol_type = other RNA
ttcaccaggaacatgtagacctgggggaaagccagagtcgggggaccccattcagcctccaaagaggctttgctgtgtgcacccaggatcccactacccac

SEQ ID NO: 27344 - RNA, 101 nt, synthetic construct
  source 1..101: mol_type = other RNA
ttcaccaggaacatgtacacctgggggaaagccagagtcgggggaccccattcagcctccaaagaggctttgctgtgtgcacccaggatcccactacccac

SEQ ID NO: 27345 - RNA, 101 nt, synthetic construct
  source 1..101: mol_type = other RNA
ttcaccaggaacatgtaaacctgggggaaagccagagtcgggggaccccattcagcctccaaagaggctttgctgtgtgcacccaggatcccactacccac

SEQ ID NO: 27346 - RNA, 102 nt, synthetic construct
  source 1..102: mol_type = other RNA
tttcaccaggaacatgtagacctgggggaaagccagagtcgggggaccccattcagcctccaaagaggctttgctgtgtgcacccaggatcccactacccac

SEQ ID NO: 27347 - RNA, 102 nt, synthetic construct
  source 1..102: mol_type = other RNA
tttcaccaggaacatgtacacctgggggaaagccagagtcgggggaccccattcagcctccaaagaggctttgctgtgtgcacccaggatcccactacccac

SEQ ID NO: 27348 - RNA, 102 nt, synthetic construct
  source 1..102: mol_type = other RNA
tttcaccaggaacatgtaaacctgggggaaagccagagtcgggggaccccattcagcctccaaagaggctttgctgtgtgcacccaggatcccactacccac

SEQ ID NO: 27349 - RNA, 102 nt, synthetic construct
  source 1..102: mol_type = other RNA
tttcaccaggaacatgtatacctgggggaaagccagagtcgggggaccccattcagcctccaaagaggctttgctgtgtgcacccaggatcccactacccac

SEQ ID NO: 27350 - RNA, 103 nt, synthetic construct
  source 1..103: mol_type = other RNA
atttcaccaggaacatgtaaacctgggggaaagccagagtcgggggaccccattcagcctccaaagaggctttgctgtgtgcacccaggatcccactacccac

SEQ ID NO: 27351 - RNA, 103 nt, synthetic construct
  source 1..103: mol_type = other RNA
atttcaccaggaacatgtacacctgggggaaagccagagtcgggggaccccattcagcctccaaagaggctttgctgtgtgcacccaggatcccactacccac

SEQ ID NO: 27352 - RNA, 103 nt, synthetic construct
  source 1..103: mol_type = other RNA
atttcaccaggaacatgtagacctgggggaaagccagagtcgggggaccccattcagcctccaaagaggctttgctgtgtgcacccaggatcccactacccac

SEQ ID NO: 27353 - RNA, 103 nt, synthetic construct
  source 1..103: mol_type = other RNA
atttcaccaggaacatgtatacctgggggaaagccagagtcgggggaccccattcagcctccaaagaggctttgctgtgtgcacccaggatcccactacccac

SEQ ID NO: 27354 - RNA, 16 nt, synthetic construct
  source 1..16: mol_type = other RNA
gcttcctccagtgggt

SEQ ID NO: 27355 - RNA, 17 nt, synthetic construct
  source 1..17: mol_type = other RNA
ggcttcctccagtgggt

SEQ ID NO: 27356 - RNA, 18 nt, synthetic construct
  source 1..18: mol_type = other RNA
gggcttcctccagtgggt

SEQ ID NO: 27357 - RNA, 19 nt, synthetic construct
  source 1..19: mol_type = other RNA
tgggcttcctccagtgggt

SEQ ID NO: 27358 - RNA, 20 nt, synthetic construct
  source 1..20: mol_type = other RNA
ctgggcttcctccagtgggt

SEQ ID NO: 27359 - RNA, 21 nt, synthetic construct
  source 1..21: mol_type = other RNA
tctgggcttcctccagtgggt

SEQ ID NO: 27360 - RNA, 22 nt, synthetic construct
  source 1..22: mol_type = other RNA
ctctgggcttcctccagtgggt

SEQ ID NO: 27361-27366 - skipped (6 entries)

SEQ ID NO: 27367 - RNA, 10 nt, synthetic construct
  source 1..10: mol_type = other RNA
cactggagga

SEQ ID NO: 27368 - RNA, 11 nt, synthetic construct
  source 1..11: mol_type = other RNA
cactggaggaa

SEQ ID NO: 27369 - RNA, 12 nt, synthetic construct
  source 1..12: mol_type = other RNA
cactggaggaag

SEQ ID NO: 27370 - RNA, 13 nt, synthetic construct
  source 1..13: mol_type = other RNA
cactggaggaagc

SEQ ID NO: 27371 - RNA, 14 nt, synthetic construct
  source 1..14: mol_type = other RNA
cactggaggaagcc

SEQ ID NO: 27372 - RNA, 15 nt, synthetic construct
  source 1..15: mol_type = other RNA
cactggaggaagccc

SEQ ID NO: 27373 - RNA, 16 nt, synthetic construct
  source 1..16: mol_type = other RNA
cactggaggaagccca

SEQ ID NO: 27374 - RNA, 17 nt, synthetic construct
  source 1..17: mol_type = other RNA
cactggaggaagcccag

SEQ ID NO: 27375 - RNA, 18 nt, synthetic construct
  source 1..18: mol_type = other RNA
cactggaggaagcccaga

SEQ ID NO: 27376 - RNA, 19 nt, synthetic construct
  source 1..19: mol_type = other RNA
cactggaggaagcccagag

SEQ ID NO: 27377 - RNA, 80 nt, synthetic construct
  source 1..80: mol_type = other RNA
acctgggggaaagccagagtcgggggaccccattcagcctccaaagaggctttgctgtgtgcacccaggatcccactacc

SEQ ID NO: 27378 - RNA, 81 nt, synthetic construct
  source 1..81: mol_type = other RNA
aacctgggggaaagccagagtcgggggaccccattcagcctccaaagaggctttgctgtgtgcacccaggatcccactacc

SEQ ID NO: 27379 - RNA, 81 nt, synthetic construct
  source 1..81: mol_type = other RNA
cacctgggggaaagccagagtcgggggaccccattcagcctccaaagaggctttgctgtgtgcacccaggatcccactacc

SEQ ID NO: 27380 - RNA, 81 nt, synthetic construct
  source 1..81: mol_type = other RNA
gacctgggggaaagccagagtcgggggaccccattcagcctccaaagaggctttgctgtgtgcacccaggatcccactacc

SEQ ID NO: 27381 - RNA, 81 nt, synthetic construct
  source 1..81: mol_type = other RNA
tacctgggggaaagccagagtcgggggaccccattcagcctccaaagaggctttgctgtgtgcacccaggatcccactacc

SEQ ID NO: 27382 - RNA, 82 nt, synthetic construct
  source 1..82: mol_type = other RNA
aaacctgggggaaagccagagtcgggggaccccattcagcctccaaagaggctttgctgtgtgcacccaggatcccactacc

SEQ ID NO: 27383 - RNA, 82 nt, synthetic construct
  source 1..82: mol_type = other RNA
acacctgggggaaagccagagtcgggggaccccattcagcctccaaagaggctttgctgtgtgcacccaggatcccactacc

SEQ ID NO: 27384 - RNA, 82 nt, synthetic construct
  source 1..82: mol_type = other RNA
atacctgggggaaagccagagtcgggggaccccattcagcctccaaagaggctttgctgtgtgcacccaggatcccactacc

SEQ ID NO: 27385 - RNA, 82 nt, synthetic construct
  source 1..82: mol_type = other RNA
agacctgggggaaagccagagtcgggggaccccattcagcctccaaagaggctttgctgtgtgcacccaggatcccactacc

SEQ ID NO: 27386 - RNA, 83 nt, synthetic construct
  source 1..83: mol_type = other RNA
taaacctgggggaaagccagagtcgggggaccccattcagcctccaaagaggctttgctgtgtgcacccaggatcccactacc

SEQ ID NO: 27387 - RNA, 83 nt, synthetic construct
  source 1..83: mol_type = other RNA
tagacctgggggaaagccagagtcgggggaccccattcagcctccaaagaggctttgctgtgtgcacccaggatcccactacc

SEQ ID NO: 27388 - RNA, 83 nt, synthetic construct
  source 1..83: mol_type = other RNA
tacacctgggggaaagccagagtcgggggaccccattcagcctccaaagaggctttgctgtgtgcacccaggatcccactacc

SEQ ID NO: 27389 - RNA, 83 nt, synthetic construct
  source 1..83: mol_type = other RNA
tatacctgggggaaagccagagtcgggggaccccattcagcctccaaagaggctttgctgtgtgcacccaggatcccactacc

SEQ ID NO: 27390 - RNA, 84 nt, synthetic construct
  source 1..84: mol_type = other RNA
gtacacctgggggaaagccagagtcgggggaccccattcagcctccaaagaggctttgctgtgtgcacccaggatcccactacc

SEQ ID NO: 27391 - RNA, 84 nt, synthetic construct
  source 1..84: mol_type = other RNA
gtaaacctgggggaaagccagagtcgggggaccccattcagcctccaaagaggctttgctgtgtgcacccaggatcccactacc

SEQ ID NO: 27392 - RNA, 84 nt, synthetic construct
  source 1..84: mol_type = other RNA
gtatacctgggggaaagccagagtcgggggaccccattcagcctccaaagaggctttgctgtgtgcacccaggatcccactacc

SEQ ID NO: 27393 - RNA, 84 nt, synthetic construct
  source 1..84: mol_type = other RNA
gtagacctgggggaaagccagagtcgggggaccccattcagcctccaaagaggctttgctgtgtgcacccaggatcccactacc

SEQ ID NO: 27394 - RNA, 85 nt, synthetic construct
  source 1..85: mol_type = other RNA
tgtacacctgggggaaagccagagtcgggggaccccattcagcctccaaagaggctttgctgtgtgcacccaggatcccactacc

SEQ ID NO: 27395 - RNA, 85 nt, synthetic construct
  source 1..85: mol_type = other RNA
tgtatacctgggggaaagccagagtcgggggaccccattcagcctccaaagaggctttgctgtgtgcacccaggatcccactacc

SEQ ID NO: 27396 - RNA, 85 nt, synthetic construct
  source 1..85: mol_type = other RNA
tgtaaacctgggggaaagccagagtcgggggaccccattcagcctccaaagaggctttgctgtgtgcacccaggatcccactacc

SEQ ID NO: 27397 - RNA, 85 nt, synthetic construct
  source 1..85: mol_type = other RNA
tgtagacctgggggaaagccagagtcgggggaccccattcagcctccaaagaggctttgctgtgtgcacccaggatcccactacc

SEQ ID NO: 27398 - RNA, 86 nt, synthetic construct
  source 1..86: mol_type = other RNA
atgtagacctgggggaaagccagagtcgggggaccccattcagcctccaaagaggctttgctgtgtgcacccaggatcccactacc

SEQ ID NO: 27399 - RNA, 86 nt, synthetic construct
  source 1..86: mol_type = other RNA
atgtaaacctgggggaaagccagagtcgggggaccccattcagcctccaaagaggctttgctgtgtgcacccaggatcccactacc

SEQ ID NO: 27400 - RNA, 86 nt, synthetic construct
  source 1..86: mol_type = other RNA
atgtacacctgggggaaagccagagtcgggggaccccattcagcctccaaagaggctttgctgtgtgcacccaggatcccactacc

SEQ ID NO: 27401 - RNA, 86 nt, synthetic construct
  source 1..86: mol_type = other RNA
atgtatacctgggggaaagccagagtcgggggaccccattcagcctccaaagaggctttgctgtgtgcacccaggatcccactacc

SEQ ID NO: 27402 - RNA, 87 nt, synthetic construct
  source 1..87: mol_type = other RNA
catgtaaacctgggggaaagccagagtcgggggaccccattcagcctccaaagaggctttgctgtgtgcacccaggatcccactacc

SEQ ID NO: 27403 - RNA, 87 nt, synthetic construct
  source 1..87: mol_type = other RNA
catgtatacctgggggaaagccagagtcgggggaccccattcagcctccaaagaggctttgctgtgtgcacccaggatcccactacc

SEQ ID NO: 27404 - RNA, 87 nt, synthetic construct
  source 1..87: mol_type = other RNA
catgtacacctgggggaaagccagagtcgggggaccccattcagcctccaaagaggctttgctgtgtgcacccaggatcccactacc

SEQ ID NO: 27405 - RNA, 87 nt, synthetic construct
  source 1..87: mol_type = other RNA
catgtagacctgggggaaagccagagtcgggggaccccattcagcctccaaagaggctttgctgtgtgcacccaggatcccactacc

SEQ ID NO: 27406 - RNA, 88 nt, synthetic construct
  source 1..88: mol_type = other RNA
acatgtatacctgggggaaagccagagtcgggggaccccattcagcctccaaagaggctttgctgtgtgcacccaggatcccactacc

SEQ ID NO: 27407 - RNA, 88 nt, synthetic construct
  source 1..88: mol_type = other RNA
acatgtagacctgggggaaagccagagtcgggggaccccattcagcctccaaagaggctttgctgtgtgcacccaggatcccactacc

SEQ ID NO: 27408 - RNA, 88 nt, synthetic construct
  source 1..88: mol_type = other RNA
acatgtaaacctgggggaaagccagagtcgggggaccccattcagcctccaaagaggctttgctgtgtgcacccaggatcccactacc

SEQ ID NO: 27409 - RNA, 88 nt, synthetic construct
  source 1..88: mol_type = other RNA
acatgtacacctgggggaaagccagagtcgggggaccccattcagcctccaaagaggctttgctgtgtgcacccaggatcccactacc

SEQ ID NO: 27410 - RNA, 89 nt, synthetic construct
  source 1..89: mol_type = other RNA
aacatgtacacctgggggaaagccagagtcgggggaccccattcagcctccaaagaggctttgctgtgtgcacccaggatcccactacc

SEQ ID NO: 27411 - RNA, 89 nt, synthetic construct
  source 1..89: mol_type = other RNA
aacatgtagacctgggggaaagccagagtcgggggaccccattcagcctccaaagaggctttgctgtgtgcacccaggatcccactacc

SEQ ID NO: 27412 - RNA, 89 nt, synthetic construct
  source 1..89: mol_type = other RNA
aacatgtatacctgggggaaagccagagtcgggggaccccattcagcctccaaagaggctttgctgtgtgcacccaggatcccactacc

SEQ ID NO: 27413 - RNA, 89 nt, synthetic construct
  source 1..89: mol_type = other RNA
aacatgtaaacctgggggaaagccagagtcgggggaccccattcagcctccaaagaggctttgctgtgtgcacccaggatcccactacc

SEQ ID NO: 27414 - RNA, 90 nt, synthetic construct
  source 1..90: mol_type = other RNA
gaacatgtacacctgggggaaagccagagtcgggggaccccattcagcctccaaagaggctttgctgtgtgcacccaggatcccactacc

SEQ ID NO: 27415 - RNA, 90 nt, synthetic construct
  source 1..90: mol_type = other RNA
gaacatgtaaacctgggggaaagccagagtcgggggaccccattcagcctccaaagaggctttgctgtgtgcacccaggatcccactacc

SEQ ID NO: 27416 - RNA, 90 nt, synthetic construct
  source 1..90: mol_type = other RNA
gaacatgtagacctgggggaaagccagagtcgggggaccccattcagcctccaaagaggctttgctgtgtgcacccaggatcccactacc

SEQ ID NO: 27417 - RNA, 90 nt, synthetic construct
  source 1..90: mol_type = other RNA
gaacatgtatacctgggggaaagccagagtcgggggaccccattcagcctccaaagaggctttgctgtgtgcacccaggatcccactacc

SEQ ID NO: 27418 - RNA, 91 nt, synthetic construct
  source 1..91: mol_type = other RNA
ggaacatgtacacctgggggaaagccagagtcgggggaccccattcagcctccaaagaggctttgctgtgtgcacccaggatcccactacc

SEQ ID NO: 27419 - RNA, 91 nt, synthetic construct
  source 1..91: mol_type = other RNA
ggaacatgtatacctgggggaaagccagagtcgggggaccccattcagcctccaaagaggctttgctgtgtgcacccaggatcccactacc

SEQ ID NO: 27420 - RNA, 91 nt, synthetic construct
  source 1..91: mol_type = other RNA
ggaacatgtaaacctgggggaaagccagagtcgggggaccccattcagcctccaaagaggctttgctgtgtgcacccaggatcccactacc

SEQ ID NO: 27421 - RNA, 91 nt, synthetic construct
  source 1..91: mol_type = other RNA
ggaacatgtagacctgggggaaagccagagtcgggggaccccattcagcctccaaagaggctttgctgtgtgcacccaggatcccactacc

SEQ ID NO: 27422 - RNA, 92 nt, synthetic construct
  source 1..92: mol_type = other RNA
aggaacatgtagacctgggggaaagccagagtcgggggaccccattcagcctccaaagaggctttgctgtgtgcacccaggatcccactacc

SEQ ID NO: 27423 - RNA, 92 nt, synthetic construct
  source 1..92: mol_type = other RNA
aggaacatgtaaacctgggggaaagccagagtcgggggaccccattcagcctccaaagaggctttgctgtgtgcacccaggatcccactacc

SEQ ID NO: 27424 - RNA, 92 nt, synthetic construct
  source 1..92: mol_type = other RNA
aggaacatgtacacctgggggaaagccagagtcgggggaccccattcagcctccaaagaggctttgctgtgtgcacccaggatcccactacc

SEQ ID NO: 27425 - RNA, 92 nt, synthetic construct
  source 1..92: mol_type = other RNA
aggaacatgtatacctgggggaaagccagagtcgggggaccccattcagcctccaaagaggctttgctgtgtgcacccaggatcccactacc

SEQ ID NO: 27426 - RNA, 93 nt, synthetic construct
  source 1..93: mol_type = other RNA
caggaacatgtagacctgggggaaagccagagtcgggggaccccattcagcctccaaagaggctttgctgtgtgcacccaggatcccactacc

SEQ ID NO: 27427 - RNA, 93 nt, synthetic construct
  source 1..93: mol_type = other RNA
caggaacatgtatacctgggggaaagccagagtcgggggaccccattcagcctccaaagaggctttgctgtgtgcacccaggatcccactacc

SEQ ID NO: 27428 - RNA, 93 nt, synthetic construct
  source 1..93: mol_type = other RNA
caggaacatgtaaacctgggggaaagccagagtcgggggaccccattcagcctccaaagaggctttgctgtgtgcacccaggatcccactacc

SEQ ID NO: 27429 - RNA, 93 nt, synthetic construct
  source 1..93: mol_type = other RNA
caggaacatgtacacctgggggaaagccagagtcgggggaccccattcagcctccaaagaggctttgctgtgtgcacccaggatcccactacc

SEQ ID NO: 27430 - RNA, 94 nt, synthetic construct
  source 1..94: mol_type = other RNA
ccaggaacatgtaaacctgggggaaagccagagtcgggggaccccattcagcctccaaagaggctttgctgtgtgcacccaggatcccactacc

SEQ ID NO: 27431 - RNA, 94 nt, synthetic construct
  source 1..94: mol_type = other RNA
ccaggaacatgtacacctgggggaaagccagagtcgggggaccccattcagcctccaaagaggctttgctgtgtgcacccaggatcccactacc

SEQ ID NO: 27432 - RNA, 94 nt, synthetic construct
  source 1..94: mol_type = other RNA
ccaggaacatgtatacctgggggaaagccagagtcgggggaccccattcagcctccaaagaggctttgctgtgtgcacccaggatcccactacc

SEQ ID NO: 27433 - RNA, 94 nt, synthetic construct
  source 1..94: mol_type = other RNA
ccaggaacatgtagacctgggggaaagccagagtcgggggaccccattcagcctccaaagaggctttgctgtgtgcacccaggatcccactacc

SEQ ID NO: 27434 - RNA, 95 nt, synthetic construct
  source 1..95: mol_type = other RNA
accaggaacatgtaaacctgggggaaagccagagtcgggggaccccattcagcctccaaagaggctttgctgtgtgcacccaggatcccactacc

SEQ ID NO: 27435 - RNA, 95 nt, synthetic construct
  source 1..95: mol_type = other RNA
accaggaacatgtacacctgggggaaagccagagtcgggggaccccattcagcctccaaagaggctttgctgtgtgcacccaggatcccactacc

SEQ ID NO: 27436 - RNA, 95 nt, synthetic construct
  source 1..95: mol_type = other RNA
accaggaacatgtatacctgggggaaagccagagtcgggggaccccattcagcctccaaagaggctttgctgtgtgcacccaggatcccactacc

SEQ ID NO: 27437 - RNA, 95 nt, synthetic construct
  source 1..95: mol_type = other RNA
accaggaacatgtagacctgggggaaagccagagtcgggggaccccattcagcctccaaagaggctttgctgtgtgcacccaggatcccactacc

SEQ ID NO: 27438 - RNA, 96 nt, synthetic construct
  source 1..96: mol_type = other RNA
caccaggaacatgtagacctgggggaaagccagagtcgggggaccccattcagcctccaaagaggctttgctgtgtgcacccaggatcccactacc

SEQ ID NO: 27439 - RNA, 96 nt, synthetic construct
  source 1..96: mol_type = other RNA
caccaggaacatgtacacctgggggaaagccagagtcgggggaccccattcagcctccaaagaggctttgctgtgtgcacccaggatcccactacc

SEQ ID NO: 27440 - RNA, 96 nt, synthetic construct
  source 1..96: mol_type = other RNA
caccaggaacatgtatacctgggggaaagccagagtcgggggaccccattcagcctccaaagaggctttgctgtgtgcacccaggatcccactacc

SEQ ID NO: 27441 - RNA, 96 nt, synthetic construct
  source 1..96: mol_type = other RNA
caccaggaacatgtaaacctgggggaaagccagagtcgggggaccccattcagcctccaaagaggctttgctgtgtgcacccaggatcccactacc

SEQ ID NO: 27442 - RNA, 97 nt, synthetic construct
  source 1..97: mol_type = other RNA
tcaccaggaacatgtaaacctgggggaaagccagagtcgggggaccccattcagcctccaaagaggctttgctgtgtgcacccaggatcccactacc

SEQ ID NO: 27443 - RNA, 97 nt, synthetic construct
  source 1..97: mol_type = other RNA
tcaccaggaacatgtacacctgggggaaagccagagtcgggggaccccattcagcctccaaagaggctttgctgtgtgcacccaggatcccactacc

SEQ ID NO: 27444 - RNA, 97 nt, synthetic construct
  source 1..97: mol_type = other RNA
tcaccaggaacatgtagacctgggggaaagccagagtcgggggaccccattcagcctccaaagaggctttgctgtgtgcacccaggatcccactacc

SEQ ID NO: 27445 - RNA, 97 nt, synthetic construct
  source 1..97: mol_type = other RNA
tcaccaggaacatgtatacctgggggaaagccagagtcgggggaccccattcagcctccaaagaggctttgctgtgtgcacccaggatcccactacc

SEQ ID NO: 27446 - RNA, 98 nt, synthetic construct
  source 1..98: mol_type = other RNA
ttcaccaggaacatgtatacctgggggaaagccagagtcgggggaccccattcagcctccaaagaggctttgctgtgtgcacccaggatcccactacc

SEQ ID NO: 27447 - RNA, 98 nt, synthetic construct
  source 1..98: mol_type = other RNA
ttcaccaggaacatgtaaacctgggggaaagccagagtcgggggaccccattcagcctccaaagaggctttgctgtgtgcacccaggatcccactacc

SEQ ID NO: 27448 - RNA, 98 nt, synthetic construct
  source 1..98: mol_type = other RNA
ttcaccaggaacatgtacacctgggggaaagccagagtcgggggaccccattcagcctccaaagaggctttgctgtgtgcacccaggatcccactacc

SEQ ID NO: 27449 - RNA, 98 nt, synthetic construct
  source 1..98: mol_type = other RNA
ttcaccaggaacatgtagacctgggggaaagccagagtcgggggaccccattcagcctccaaagaggctttgctgtgtgcacccaggatcccactacc

SEQ ID NO: 27450 - RNA, 99 nt, synthetic construct
  source 1..99: mol_type = other RNA
tttcaccaggaacatgtatacctgggggaaagccagagtcgggggaccccattcagcctccaaagaggctttgctgtgtgcacccaggatcccactacc

SEQ ID NO: 27451 - RNA, 99 nt, synthetic construct
  source 1..99: mol_type = other RNA
tttcaccaggaacatgtagacctgggggaaagccagagtcgggggaccccattcagcctccaaagaggctttgctgtgtgcacccaggatcccactacc

SEQ ID NO: 27452 - RNA, 99 nt, synthetic construct
  source 1..99: mol_type = other RNA
tttcaccaggaacatgtacacctgggggaaagccagagtcgggggaccccattcagcctccaaagaggctttgctgtgtgcacccaggatcccactacc

SEQ ID NO: 27453 - RNA, 99 nt, synthetic construct
  source 1..99: mol_type = other RNA
tttcaccaggaacatgtaaacctgggggaaagccagagtcgggggaccccattcagcctccaaagaggctttgctgtgtgcacccaggatcccactacc

SEQ ID NO: 27454 - RNA, 100 nt, synthetic construct
  source 1..100: mol_type = other RNA
atttcaccaggaacatgtatacctgggggaaagccagagtcgggggaccccattcagcctccaaagaggctttgctgtgtgcacccaggatcccactacc

SEQ ID NO: 27455 - RNA, 100 nt, synthetic construct
  source 1..100: mol_type = other RNA
atttcaccaggaacatgtacacctgggggaaagccagagtcgggggaccccattcagcctccaaagaggctttgctgtgtgcacccaggatcccactacc

SEQ ID NO: 27456 - RNA, 100 nt, synthetic construct
  source 1..100: mol_type = other RNA
atttcaccaggaacatgtagacctgggggaaagccagagtcgggggaccccattcagcctccaaagaggctttgctgtgtgcacccaggatcccactacc

SEQ ID NO: 27457 - RNA, 100 nt, synthetic construct
  source 1..100: mol_type = other RNA
atttcaccaggaacatgtaaacctgggggaaagccagagtcgggggaccccattcagcctccaaagaggctttgctgtgtgcacccaggatcccactacc

SEQ ID NO: 27458 - RNA, 101 nt, synthetic construct
  source 1..101: mol_type = other RNA
catttcaccaggaacatgtaaacctgggggaaagccagagtcgggggaccccattcagcctccaaagaggctttgctgtgtgcacccaggatcccactacc

SEQ ID NO: 27459 - RNA, 101 nt, synthetic construct
  source 1..101: mol_type = other RNA
catttcaccaggaacatgtatacctgggggaaagccagagtcgggggaccccattcagcctccaaagaggctttgctgtgtgcacccaggatcccactacc

SEQ ID NO: 27460 - RNA, 101 nt, synthetic construct
  source 1..101: mol_type = other RNA
catttcaccaggaacatgtacacctgggggaaagccagagtcgggggaccccattcagcctccaaagaggctttgctgtgtgcacccaggatcccactacc

SEQ ID NO: 27461 - RNA, 101 nt, synthetic construct
  source 1..101: mol_type = other RNA
catttcaccaggaacatgtagacctgggggaaagccagagtcgggggaccccattcagcctccaaagaggctttgctgtgtgcacccaggatcccactacc

SEQ ID NO: 27462 - RNA, 102 nt, synthetic construct
  source 1..102: mol_type = other RNA
ccatttcaccaggaacatgtatacctgggggaaagccagagtcgggggaccccattcagcctccaaagaggctttgctgtgtgcacccaggatcccactacc

SEQ ID NO: 27463 - RNA, 102 nt, synthetic construct
  source 1..102: mol_type = other RNA
ccatttcaccaggaacatgtagacctgggggaaagccagagtcgggggaccccattcagcctccaaagaggctttgctgtgtgcacccaggatcccactacc

SEQ ID NO: 27464 - RNA, 102 nt, synthetic construct
  source 1..102: mol_type = other RNA
ccatttcaccaggaacatgtacacctgggggaaagccagagtcgggggaccccattcagcctccaaagaggctttgctgtgtgcacccaggatcccactacc

SEQ ID NO: 27465 - RNA, 102 nt, synthetic construct
  source 1..102: mol_type = other RNA
ccatttcaccaggaacatgtaaacctgggggaaagccagagtcgggggaccccattcagcctccaaagaggctttgctgtgtgcacccaggatcccactacc

SEQ ID NO: 27466 - RNA, 103 nt, synthetic construct
  source 1..103: mol_type = other RNA
gccatttcaccaggaacatgtacacctgggggaaagccagagtcgggggaccccattcagcctccaaagaggctttgctgtgtgcacccaggatcccactacc

SEQ ID NO: 27467 - RNA, 103 nt, synthetic construct
  source 1..103: mol_type = other RNA
gccatttcaccaggaacatgtaaacctgggggaaagccagagtcgggggaccccattcagcctccaaagaggctttgctgtgtgcacccaggatcccactacc

SEQ ID NO: 27468 - RNA, 103 nt, synthetic construct
  source 1..103: mol_type = other RNA
gccatttcaccaggaacatgtatacctgggggaaagccagagtcgggggaccccattcagcctccaaagaggctttgctgtgtgcacccaggatcccactacc

SEQ ID NO: 27469 - RNA, 103 nt, synthetic construct
  source 1..103: mol_type = other RNA
gccatttcaccaggaacatgtagacctgggggaaagccagagtcgggggaccccattcagcctccaaagaggctttgctgtgtgcacccaggatcccactacc

SEQ ID NO: 27470 - RNA, 16 nt, synthetic construct
  source 1..16: mol_type = other RNA
gtagtgggatcctggg

SEQ ID NO: 27471 - RNA, 17 nt, synthetic construct
  source 1..17: mol_type = other RNA
ggtagtgggatcctggg

SEQ ID NO: 27472 - RNA, 18 nt, synthetic construct
  source 1..18: mol_type = other RNA
gggtagtgggatcctggg

SEQ ID NO: 27473 - RNA, 19 nt, synthetic construct
  source 1..19: mol_type = other RNA
tgggtagtgggatcctggg

SEQ ID NO: 27474 - RNA, 20 nt, synthetic construct
  source 1..20: mol_type = other RNA
gtgggtagtgggatcctggg

SEQ ID NO: 27475 - RNA, 21 nt, synthetic construct
  source 1..21: mol_type = other RNA
agtgggtagtgggatcctggg

SEQ ID NO: 27476 - RNA, 22 nt, synthetic construct
  source 1..22: mol_type = other RNA
cagtgggtagtgggatcctggg

SEQ ID NO: 27477-27481 - skipped (5 entries)

SEQ ID NO: 27482 - RNA, 10 nt, synthetic construct
  source 1..10: mol_type = other RNA
aggatcccac

SEQ ID NO: 27483 - RNA, 11 nt, synthetic construct
  source 1..11: mol_type = other RNA
aggatcccact

SEQ ID NO: 27484 - RNA, 12 nt, synthetic construct
  source 1..12: mol_type = other RNA
aggatcccacta

SEQ ID NO: 27485 - RNA, 13 nt, synthetic construct
  source 1..13: mol_type = other RNA
aggatcccactac

SEQ ID NO: 27486 - RNA, 14 nt, synthetic construct
  source 1..14: mol_type = other RNA
aggatcccactacc

SEQ ID NO: 27487 - RNA, 15 nt, synthetic construct
  source 1..15: mol_type = other RNA
aggatcccactaccc

SEQ ID NO: 27488 - RNA, 16 nt, synthetic construct
  source 1..16: mol_type = other RNA
aggatcccactaccca

SEQ ID NO: 27489 - RNA, 17 nt, synthetic construct
  source 1..17: mol_type = other RNA
aggatcccactacccac

SEQ ID NO: 27490 - RNA, 18 nt, synthetic construct
  source 1..18: mol_type = other RNA
aggatcccactacccact

SEQ ID NO: 27491 - RNA, 19 nt, synthetic construct
  source 1..19: mol_type = other RNA
aggatcccactacccactg

SEQ ID NO: 27492 - RNA, 66 nt, synthetic construct
  source 1..66: mol_type = other RNA
acctgggggaaagccagagtcgggggaccccattcagcctccaaagaggctttgctgtgtgcaccc

SEQ ID NO: 27493 - RNA, 67 nt, synthetic construct
  source 1..67: mol_type = other RNA
tacctgggggaaagccagagtcgggggaccccattcagcctccaaagaggctttgctgtgtgcaccc

SEQ ID NO: 27494 - RNA, 67 nt, synthetic construct
  source 1..67: mol_type = other RNA
aacctgggggaaagccagagtcgggggaccccattcagcctccaaagaggctttgctgtgtgcaccc

SEQ ID NO: 27495 - RNA, 67 nt, synthetic construct
  source 1..67: mol_type = other RNA
cacctgggggaaagccagagtcgggggaccccattcagcctccaaagaggctttgctgtgtgcaccc

SEQ ID NO: 27496 - RNA, 67 nt, synthetic construct
  source 1..67: mol_type = other RNA
gacctgggggaaagccagagtcgggggaccccattcagcctccaaagaggctttgctgtgtgcaccc

SEQ ID NO: 27497 - RNA, 68 nt, synthetic construct
  source 1..68: mol_type = other RNA
acacctgggggaaagccagagtcgggggaccccattcagcctccaaagaggctttgctgtgtgcaccc

SEQ ID NO: 27498 - RNA, 68 nt, synthetic construct
  source 1..68: mol_type = other RNA
agacctgggggaaagccagagtcgggggaccccattcagcctccaaagaggctttgctgtgtgcaccc

SEQ ID NO: 27499 - RNA, 68 nt, synthetic construct
  source 1..68: mol_type = other RNA
atacctgggggaaagccagagtcgggggaccccattcagcctccaaagaggctttgctgtgtgcaccc

SEQ ID NO: 27500 - RNA, 68 nt, synthetic construct
  source 1..68: mol_type = other RNA
aaacctgggggaaagccagagtcgggggaccccattcagcctccaaagaggctttgctgtgtgcaccc

SEQ ID NO: 27501 - RNA, 69 nt, synthetic construct
  source 1..69: mol_type = other RNA
taaacctgggggaaagccagagtcgggggaccccattcagcctccaaagaggctttgctgtgtgcaccc

SEQ ID NO: 27502 - RNA, 69 nt, synthetic construct
  source 1..69: mol_type = other RNA
tatacctgggggaaagccagagtcgggggaccccattcagcctccaaagaggctttgctgtgtgcaccc

SEQ ID NO: 27503 - RNA, 69 nt, synthetic construct
  source 1..69: mol_type = other RNA
tagacctgggggaaagccagagtcgggggaccccattcagcctccaaagaggctttgctgtgtgcaccc

SEQ ID NO: 27504 - RNA, 69 nt, synthetic construct
  source 1..69: mol_type = other RNA
tacacctgggggaaagccagagtcgggggaccccattcagcctccaaagaggctttgctgtgtgcaccc

SEQ ID NO: 27505 - RNA, 70 nt, synthetic construct
  source 1..70: mol_type = other RNA
gtagacctgggggaaagccagagtcgggggaccccattcagcctccaaagaggctttgctgtgtgcaccc

SEQ ID NO: 27506 - RNA, 70 nt, synthetic construct
  source 1..70: mol_type = other RNA
gtacacctgggggaaagccagagtcgggggaccccattcagcctccaaagaggctttgctgtgtgcaccc

SEQ ID NO: 27507 - RNA, 70 nt, synthetic construct
  source 1..70: mol_type = other RNA
gtatacctgggggaaagccagagtcgggggaccccattcagcctccaaagaggctttgctgtgtgcaccc

SEQ ID NO: 27508 - RNA, 70 nt, synthetic construct
  source 1..70: mol_type = other RNA
gtaaacctgggggaaagccagagtcgggggaccccattcagcctccaaagaggctttgctgtgtgcaccc

SEQ ID NO: 27509 - RNA, 71 nt, synthetic construct
  source 1..71: mol_type = other RNA
tgtacacctgggggaaagccagagtcgggggaccccattcagcctccaaagaggctttgctgtgtgcaccc

SEQ ID NO: 27510 - RNA, 71 nt, synthetic construct
  source 1..71: mol_type = other RNA
tgtaaacctgggggaaagccagagtcgggggaccccattcagcctccaaagaggctttgctgtgtgcaccc

SEQ ID NO: 27511 - RNA, 71 nt, synthetic construct
  source 1..71: mol_type = other RNA
tgtatacctgggggaaagccagagtcgggggaccccattcagcctccaaagaggctttgctgtgtgcaccc

SEQ ID NO: 27512 - RNA, 71 nt, synthetic construct
  source 1..71: mol_type = other RNA
tgtagacctgggggaaagccagagtcgggggaccccattcagcctccaaagaggctttgctgtgtgcaccc

SEQ ID NO: 27513 - RNA, 72 nt, synthetic construct
  source 1..72: mol_type = other RNA
atgtagacctgggggaaagccagagtcgggggaccccattcagcctccaaagaggctttgctgtgtgcaccc

SEQ ID NO: 27514 - RNA, 72 nt, synthetic construct
  source 1..72: mol_type = other RNA
atgtacacctgggggaaagccagagtcgggggaccccattcagcctccaaagaggctttgctgtgtgcaccc

SEQ ID NO: 27515 - RNA, 72 nt, synthetic construct
  source 1..72: mol_type = other RNA
atgtaaacctgggggaaagccagagtcgggggaccccattcagcctccaaagaggctttgctgtgtgcaccc

SEQ ID NO: 27516 - RNA, 72 nt, synthetic construct
  source 1..72: mol_type = other RNA
atgtatacctgggggaaagccagagtcgggggaccccattcagcctccaaagaggctttgctgtgtgcaccc

SEQ ID NO: 27517 - RNA, 73 nt, synthetic construct
  source 1..73: mol_type = other RNA
catgtaaacctgggggaaagccagagtcgggggaccccattcagcctccaaagaggctttgctgtgtgcaccc

SEQ ID NO: 27518 - RNA, 73 nt, synthetic construct
  source 1..73: mol_type = other RNA
catgtacacctgggggaaagccagagtcgggggaccccattcagcctccaaagaggctttgctgtgtgcaccc

SEQ ID NO: 27519 - RNA, 73 nt, synthetic construct
  source 1..73: mol_type = other RNA
catgtagacctgggggaaagccagagtcgggggaccccattcagcctccaaagaggctttgctgtgtgcaccc

SEQ ID NO: 27520 - RNA, 73 nt, synthetic construct
  source 1..73: mol_type = other RNA
catgtatacctgggggaaagccagagtcgggggaccccattcagcctccaaagaggctttgctgtgtgcaccc

SEQ ID NO: 27521 - RNA, 74 nt, synthetic construct
  source 1..74: mol_type = other RNA
acatgtagacctgggggaaagccagagtcgggggaccccattcagcctccaaagaggctttgctgtgtgcaccc

SEQ ID NO: 27522 - RNA, 74 nt, synthetic construct
  source 1..74: mol_type = other RNA
acatgtaaacctgggggaaagccagagtcgggggaccccattcagcctccaaagaggctttgctgtgtgcaccc

SEQ ID NO: 27523 - RNA, 74 nt, synthetic construct
  source 1..74: mol_type = other RNA
acatgtacacctgggggaaagccagagtcgggggaccccattcagcctccaaagaggctttgctgtgtgcaccc

SEQ ID NO: 27524 - RNA, 74 nt, synthetic construct
  source 1..74: mol_type = other RNA
acatgtatacctgggggaaagccagagtcgggggaccccattcagcctccaaagaggctttgctgtgtgcaccc

SEQ ID NO: 27525 - RNA, 75 nt, synthetic construct
  source 1..75: mol_type = other RNA
aacatgtagacctgggggaaagccagagtcgggggaccccattcagcctccaaagaggctttgctgtgtgcaccc

SEQ ID NO: 27526 - RNA, 75 nt, synthetic construct
  source 1..75: mol_type = other RNA
aacatgtatacctgggggaaagccagagtcgggggaccccattcagcctccaaagaggctttgctgtgtgcaccc

SEQ ID NO: 27527 - RNA, 75 nt, synthetic construct
  source 1..75: mol_type = other RNA
aacatgtaaacctgggggaaagccagagtcgggggaccccattcagcctccaaagaggctttgctgtgtgcaccc

SEQ ID NO: 27528 - RNA, 75 nt, synthetic construct
  source 1..75: mol_type = other RNA
aacatgtacacctgggggaaagccagagtcgggggaccccattcagcctccaaagaggctttgctgtgtgcaccc

SEQ ID NO: 27529 - RNA, 76 nt, synthetic construct
  source 1..76: mol_type = other RNA
gaacatgtaaacctgggggaaagccagagtcgggggaccccattcagcctccaaagaggctttgctgtgtgcaccc

SEQ ID NO: 27530 - RNA, 76 nt, synthetic construct
  source 1..76: mol_type = other RNA
gaacatgtacacctgggggaaagccagagtcgggggaccccattcagcctccaaagaggctttgctgtgtgcaccc

SEQ ID NO: 27531 - RNA, 76 nt, synthetic construct
  source 1..76: mol_type = other RNA
gaacatgtagacctgggggaaagccagagtcgggggaccccattcagcctccaaagaggctttgctgtgtgcaccc

SEQ ID NO: 27532 - RNA, 76 nt, synthetic construct
  source 1..76: mol_type = other RNA
gaacatgtatacctgggggaaagccagagtcgggggaccccattcagcctccaaagaggctttgctgtgtgcaccc

SEQ ID NO: 27533 - RNA, 77 nt, synthetic construct
  source 1..77: mol_type = other RNA
ggaacatgtacacctgggggaaagccagagtcgggggaccccattcagcctccaaagaggctttgctgtgtgcaccc

SEQ ID NO: 27534 - RNA, 77 nt, synthetic construct
  source 1..77: mol_type = other RNA
ggaacatgtagacctgggggaaagccagagtcgggggaccccattcagcctccaaagaggctttgctgtgtgcaccc

SEQ ID NO: 27535 - RNA, 77 nt, synthetic construct
  source 1..77: mol_type = other RNA
ggaacatgtatacctgggggaaagccagagtcgggggaccccattcagcctccaaagaggctttgctgtgtgcaccc

SEQ ID NO: 27536 - RNA, 77 nt, synthetic construct
  source 1..77: mol_type = other RNA
ggaacatgtaaacctgggggaaagccagagtcgggggaccccattcagcctccaaagaggctttgctgtgtgcaccc

SEQ ID NO: 27537 - RNA, 78 nt, synthetic construct
  source 1..78: mol_type = other RNA
aggaacatgtaaacctgggggaaagccagagtcgggggaccccattcagcctccaaagaggctttgctgtgtgcaccc

SEQ ID NO: 27538 - RNA, 78 nt, synthetic construct
  source 1..78: mol_type = other RNA
aggaacatgtacacctgggggaaagccagagtcgggggaccccattcagcctccaaagaggctttgctgtgtgcaccc

SEQ ID NO: 27539 - RNA, 78 nt, synthetic construct
  source 1..78: mol_type = other RNA
aggaacatgtagacctgggggaaagccagagtcgggggaccccattcagcctccaaagaggctttgctgtgtgcaccc

SEQ ID NO: 27540 - RNA, 78 nt, synthetic construct
  source 1..78: mol_type = other RNA
aggaacatgtatacctgggggaaagccagagtcgggggaccccattcagcctccaaagaggctttgctgtgtgcaccc

SEQ ID NO: 27541 - RNA, 79 nt, synthetic construct
  source 1..79: mol_type = other RNA
caggaacatgtagacctgggggaaagccagagtcgggggaccccattcagcctccaaagaggctttgctgtgtgcaccc

SEQ ID NO: 27542 - RNA, 79 nt, synthetic construct
  source 1..79: mol_type = other RNA
caggaacatgtatacctgggggaaagccagagtcgggggaccccattcagcctccaaagaggctttgctgtgtgcaccc

SEQ ID NO: 27543 - RNA, 79 nt, synthetic construct
  source 1..79: mol_type = other RNA
caggaacatgtaaacctgggggaaagccagagtcgggggaccccattcagcctccaaagaggctttgctgtgtgcaccc

SEQ ID NO: 27544 - RNA, 79 nt, synthetic construct
  source 1..79: mol_type = other RNA
caggaacatgtacacctgggggaaagccagagtcgggggaccccattcagcctccaaagaggctttgctgtgtgcaccc

SEQ ID NO: 27545 - RNA, 80 nt, synthetic construct
  source 1..80: mol_type = other RNA
ccaggaacatgtatacctgggggaaagccagagtcgggggaccccattcagcctccaaagaggctttgctgtgtgcaccc

SEQ ID NO: 27546 - RNA, 80 nt, synthetic construct
  source 1..80: mol_type = other RNA
ccaggaacatgtaaacctgggggaaagccagagtcgggggaccccattcagcctccaaagaggctttgctgtgtgcaccc

SEQ ID NO: 27547 - RNA, 80 nt, synthetic construct
  source 1..80: mol_type = other RNA
ccaggaacatgtacacctgggggaaagccagagtcgggggaccccattcagcctccaaagaggctttgctgtgtgcaccc

SEQ ID NO: 27548 - RNA, 80 nt, synthetic construct
  source 1..80: mol_type = other RNA
ccaggaacatgtagacctgggggaaagccagagtcgggggaccccattcagcctccaaagaggctttgctgtgtgcaccc

SEQ ID NO: 27549 - RNA, 81 nt, synthetic construct
  source 1..81: mol_type = other RNA
accaggaacatgtaaacctgggggaaagccagagtcgggggaccccattcagcctccaaagaggctttgctgtgtgcaccc

SEQ ID NO: 27550 - RNA, 81 nt, synthetic construct
  source 1..81: mol_type = other RNA
accaggaacatgtacacctgggggaaagccagagtcgggggaccccattcagcctccaaagaggctttgctgtgtgcaccc

SEQ ID NO: 27551 - RNA, 81 nt, synthetic construct
  source 1..81: mol_type = other RNA
accaggaacatgtagacctgggggaaagccagagtcgggggaccccattcagcctccaaagaggctttgctgtgtgcaccc

SEQ ID NO: 27552 - RNA, 81 nt, synthetic construct
  source 1..81: mol_type = other RNA
accaggaacatgtatacctgggggaaagccagagtcgggggaccccattcagcctccaaagaggctttgctgtgtgcaccc

SEQ ID NO: 27553 - RNA, 82 nt, synthetic construct
  source 1..82: mol_type = other RNA
caccaggaacatgtagacctgggggaaagccagagtcgggggaccccattcagcctccaaagaggctttgctgtgtgcaccc

SEQ ID NO: 27554 - RNA, 82 nt, synthetic construct
  source 1..82: mol_type = other RNA
caccaggaacatgtatacctgggggaaagccagagtcgggggaccccattcagcctccaaagaggctttgctgtgtgcaccc

SEQ ID NO: 27555 - RNA, 82 nt, synthetic construct
  source 1..82: mol_type = other RNA
caccaggaacatgtaaacctgggggaaagccagagtcgggggaccccattcagcctccaaagaggctttgctgtgtgcaccc

SEQ ID NO: 27556 - RNA, 82 nt, synthetic construct
  source 1..82: mol_type = other RNA
caccaggaacatgtacacctgggggaaagccagagtcgggggaccccattcagcctccaaagaggctttgctgtgtgcaccc

SEQ ID NO: 27557 - RNA, 83 nt, synthetic construct
  source 1..83: mol_type = other RNA
tcaccaggaacatgtaaacctgggggaaagccagagtcgggggaccccattcagcctccaaagaggctttgctgtgtgcaccc

SEQ ID NO: 27558 - RNA, 83 nt, synthetic construct
  source 1..83: mol_type = other RNA
tcaccaggaacatgtagacctgggggaaagccagagtcgggggaccccattcagcctccaaagaggctttgctgtgtgcaccc

SEQ ID NO: 27559 - RNA, 83 nt, synthetic construct
  source 1..83: mol_type = other RNA
tcaccaggaacatgtatacctgggggaaagccagagtcgggggaccccattcagcctccaaagaggctttgctgtgtgcaccc

SEQ ID NO: 27560 - RNA, 83 nt, synthetic construct
  source 1..83: mol_type = other RNA
tcaccaggaacatgtacacctgggggaaagccagagtcgggggaccccattcagcctccaaagaggctttgctgtgtgcaccc

SEQ ID NO: 27561 - RNA, 84 nt, synthetic construct
  source 1..84: mol_type = other RNA
ttcaccaggaacatgtagacctgggggaaagccagagtcgggggaccccattcagcctccaaagaggctttgctgtgtgcaccc

SEQ ID NO: 27562 - RNA, 84 nt, synthetic construct
  source 1..84: mol_type = other RNA
ttcaccaggaacatgtatacctgggggaaagccagagtcgggggaccccattcagcctccaaagaggctttgctgtgtgcaccc

SEQ ID NO: 27563 - RNA, 84 nt, synthetic construct
  source 1..84: mol_type = other RNA
ttcaccaggaacatgtaaacctgggggaaagccagagtcgggggaccccattcagcctccaaagaggctttgctgtgtgcaccc

SEQ ID NO: 27564 - RNA, 84 nt, synthetic construct
  source 1..84: mol_type = other RNA
ttcaccaggaacatgtacacctgggggaaagccagagtcgggggaccccattcagcctccaaagaggctttgctgtgtgcaccc

SEQ ID NO: 27565 - RNA, 85 nt, synthetic construct
  source 1..85: mol_type = other RNA
tttcaccaggaacatgtagacctgggggaaagccagagtcgggggaccccattcagcctccaaagaggctttgctgtgtgcaccc

SEQ ID NO: 27566 - RNA, 85 nt, synthetic construct
  source 1..85: mol_type = other RNA
tttcaccaggaacatgtatacctgggggaaagccagagtcgggggaccccattcagcctccaaagaggctttgctgtgtgcaccc

SEQ ID NO: 27567 - RNA, 85 nt, synthetic construct
  source 1..85: mol_type = other RNA
tttcaccaggaacatgtacacctgggggaaagccagagtcgggggaccccattcagcctccaaagaggctttgctgtgtgcaccc

SEQ ID NO: 27568 - RNA, 85 nt, synthetic construct
  source 1..85: mol_type = other RNA
tttcaccaggaacatgtaaacctgggggaaagccagagtcgggggaccccattcagcctccaaagaggctttgctgtgtgcaccc

SEQ ID NO: 27569 - RNA, 86 nt, synthetic construct
  source 1..86: mol_type = other RNA
atttcaccaggaacatgtaaacctgggggaaagccagagtcgggggaccccattcagcctccaaagaggctttgctgtgtgcaccc

SEQ ID NO: 27570 - RNA, 86 nt, synthetic construct
  source 1..86: mol_type = other RNA
atttcaccaggaacatgtagacctgggggaaagccagagtcgggggaccccattcagcctccaaagaggctttgctgtgtgcaccc

SEQ ID NO: 27571 - RNA, 86 nt, synthetic construct
  source 1..86: mol_type = other RNA
atttcaccaggaacatgtacacctgggggaaagccagagtcgggggaccccattcagcctccaaagaggctttgctgtgtgcaccc

SEQ ID NO: 27572 - RNA, 86 nt, synthetic construct
  source 1..86: mol_type = other RNA
atttcaccaggaacatgtatacctgggggaaagccagagtcgggggaccccattcagcctccaaagaggctttgctgtgtgcaccc

SEQ ID NO: 27573 - RNA, 87 nt, synthetic construct
  source 1..87: mol_type = other RNA
catttcaccaggaacatgtagacctgggggaaagccagagtcgggggaccccattcagcctccaaagaggctttgctgtgtgcaccc

SEQ ID NO: 27574 - RNA, 87 nt, synthetic construct
  source 1..87: mol_type = other RNA
catttcaccaggaacatgtatacctgggggaaagccagagtcgggggaccccattcagcctccaaagaggctttgctgtgtgcaccc

SEQ ID NO: 27575 - RNA, 87 nt, synthetic construct
  source 1..87: mol_type = other RNA
catttcaccaggaacatgtacacctgggggaaagccagagtcgggggaccccattcagcctccaaagaggctttgctgtgtgcaccc

SEQ ID NO: 27576 - RNA, 87 nt, synthetic construct
  source 1..87: mol_type = other RNA
catttcaccaggaacatgtaaacctgggggaaagccagagtcgggggaccccattcagcctccaaagaggctttgctgtgtgcaccc

SEQ ID NO: 27577 - RNA, 88 nt, synthetic construct
  source 1..88: mol_type = other RNA
ccatttcaccaggaacatgtatacctgggggaaagccagagtcgggggaccccattcagcctccaaagaggctttgctgtgtgcaccc

SEQ ID NO: 27578 - RNA, 88 nt, synthetic construct
  source 1..88: mol_type = other RNA
ccatttcaccaggaacatgtaaacctgggggaaagccagagtcgggggaccccattcagcctccaaagaggctttgctgtgtgcaccc

SEQ ID NO: 27579 - RNA, 88 nt, synthetic construct
  source 1..88: mol_type = other RNA
ccatttcaccaggaacatgtacacctgggggaaagccagagtcgggggaccccattcagcctccaaagaggctttgctgtgtgcaccc

SEQ ID NO: 27580 - RNA, 88 nt, synthetic construct
  source 1..88: mol_type = other RNA
ccatttcaccaggaacatgtagacctgggggaaagccagagtcgggggaccccattcagcctccaaagaggctttgctgtgtgcaccc

SEQ ID NO: 27581 - RNA, 89 nt, synthetic construct
  source 1..89: mol_type = other RNA
gccatttcaccaggaacatgtatacctgggggaaagccagagtcgggggaccccattcagcctccaaagaggctttgctgtgtgcaccc

SEQ ID NO: 27582 - RNA, 89 nt, synthetic construct
  source 1..89: mol_type = other RNA
gccatttcaccaggaacatgtacacctgggggaaagccagagtcgggggaccccattcagcctccaaagaggctttgctgtgtgcaccc

SEQ ID NO: 27583 - RNA, 89 nt, synthetic construct
  source 1..89: mol_type = other RNA
gccatttcaccaggaacatgtaaacctgggggaaagccagagtcgggggaccccattcagcctccaaagaggctttgctgtgtgcaccc

SEQ ID NO: 27584 - RNA, 89 nt, synthetic construct
  source 1..89: mol_type = other RNA
gccatttcaccaggaacatgtagacctgggggaaagccagagtcgggggaccccattcagcctccaaagaggctttgctgtgtgcaccc

SEQ ID NO: 27585 - RNA, 90 nt, synthetic construct
  source 1..90: mol_type = other RNA
tgccatttcaccaggaacatgtagacctgggggaaagccagagtcgggggaccccattcagcctccaaagaggctttgctgtgtgcaccc

SEQ ID NO: 27586 - RNA, 90 nt, synthetic construct
  source 1..90: mol_type = other RNA
tgccatttcaccaggaacatgtatacctgggggaaagccagagtcgggggaccccattcagcctccaaagaggctttgctgtgtgcaccc

SEQ ID NO: 27587 - RNA, 90 nt, synthetic construct
  source 1..90: mol_type = other RNA
tgccatttcaccaggaacatgtaaacctgggggaaagccagagtcgggggaccccattcagcctccaaagaggctttgctgtgtgcaccc

SEQ ID NO: 27588 - RNA, 90 nt, synthetic construct
  source 1..90: mol_type = other RNA
tgccatttcaccaggaacatgtacacctgggggaaagccagagtcgggggaccccattcagcctccaaagaggctttgctgtgtgcaccc

SEQ ID NO: 27589 - RNA, 91 nt, synthetic construct
  source 1..91: mol_type = other RNA
ctgccatttcaccaggaacatgtagacctgggggaaagccagagtcgggggaccccattcagcctccaaagaggctttgctgtgtgcaccc

SEQ ID NO: 27590 - RNA, 91 nt, synthetic construct
  source 1..91: mol_type = other RNA
ctgccatttcaccaggaacatgtatacctgggggaaagccagagtcgggggaccccattcagcctccaaagaggctttgctgtgtgcaccc

SEQ ID NO: 27591 - RNA, 91 nt, synthetic construct
  source 1..91: mol_type = other RNA
ctgccatttcaccaggaacatgtaaacctgggggaaagccagagtcgggggaccccattcagcctccaaagaggctttgctgtgtgcaccc

SEQ ID NO: 27592 - RNA, 91 nt, synthetic construct
  source 1..91: mol_type = other RNA
ctgccatttcaccaggaacatgtacacctgggggaaagccagagtcgggggaccccattcagcctccaaagaggctttgctgtgtgcaccc

SEQ ID NO: 27593 - RNA, 92 nt, synthetic construct
  source 1..92: mol_type = other RNA
cctgccatttcaccaggaacatgtatacctgggggaaagccagagtcgggggaccccattcagcctccaaagaggctttgctgtgtgcaccc

SEQ ID NO: 27594 - RNA, 92 nt, synthetic construct
  source 1..92: mol_type = other RNA
cctgccatttcaccaggaacatgtacacctgggggaaagccagagtcgggggaccccattcagcctccaaagaggctttgctgtgtgcaccc

SEQ ID NO: 27595 - RNA, 92 nt, synthetic construct
  source 1..92: mol_type = other RNA
cctgccatttcaccaggaacatgtagacctgggggaaagccagagtcgggggaccccattcagcctccaaagaggctttgctgtgtgcaccc

SEQ ID NO: 27596 - RNA, 92 nt, synthetic construct
  source 1..92: mol_type = other RNA
cctgccatttcaccaggaacatgtaaacctgggggaaagccagagtcgggggaccccattcagcctccaaagaggctttgctgtgtgcaccc

SEQ ID NO: 27597 - RNA, 93 nt, synthetic construct
  source 1..93: mol_type = other RNA
tcctgccatttcaccaggaacatgtacacctgggggaaagccagagtcgggggaccccattcagcctccaaagaggctttgctgtgtgcaccc

SEQ ID NO: 27598 - RNA, 93 nt, synthetic construct
  source 1..93: mol_type = other RNA
tcctgccatttcaccaggaacatgtagacctgggggaaagccagagtcgggggaccccattcagcctccaaagaggctttgctgtgtgcaccc

SEQ ID NO: 27599 - RNA, 93 nt, synthetic construct
  source 1..93: mol_type = other RNA
tcctgccatttcaccaggaacatgtatacctgggggaaagccagagtcgggggaccccattcagcctccaaagaggctttgctgtgtgcaccc

SEQ ID NO: 27600 - RNA, 93 nt, synthetic construct
  source 1..93: mol_type = other RNA
tcctgccatttcaccaggaacatgtaaacctgggggaaagccagagtcgggggaccccattcagcctccaaagaggctttgctgtgtgcaccc

SEQ ID NO: 27601 - RNA, 94 nt, synthetic construct
  source 1..94: mol_type = other RNA
gtcctgccatttcaccaggaacatgtacacctgggggaaagccagagtcgggggaccccattcagcctccaaagaggctttgctgtgtgcaccc

SEQ ID NO: 27602 - RNA, 94 nt, synthetic construct
  source 1..94: mol_type = other RNA
gtcctgccatttcaccaggaacatgtagacctgggggaaagccagagtcgggggaccccattcagcctccaaagaggctttgctgtgtgcaccc

SEQ ID NO: 27603 - RNA, 94 nt, synthetic construct
  source 1..94: mol_type = other RNA
gtcctgccatttcaccaggaacatgtatacctgggggaaagccagagtcgggggaccccattcagcctccaaagaggctttgctgtgtgcaccc

SEQ ID NO: 27604 - RNA, 94 nt, synthetic construct
  source 1..94: mol_type = other RNA
gtcctgccatttcaccaggaacatgtaaacctgggggaaagccagagtcgggggaccccattcagcctccaaagaggctttgctgtgtgcaccc

SEQ ID NO: 27605 - RNA, 95 nt, synthetic construct
  source 1..95: mol_type = other RNA
ggtcctgccatttcaccaggaacatgtagacctgggggaaagccagagtcgggggaccccattcagcctccaaagaggctttgctgtgtgcaccc

SEQ ID NO: 27606 - RNA, 95 nt, synthetic construct
  source 1..95: mol_type = other RNA
ggtcctgccatttcaccaggaacatgtatacctgggggaaagccagagtcgggggaccccattcagcctccaaagaggctttgctgtgtgcaccc

SEQ ID NO: 27607 - RNA, 95 nt, synthetic construct
  source 1..95: mol_type = other RNA
ggtcctgccatttcaccaggaacatgtaaacctgggggaaagccagagtcgggggaccccattcagcctccaaagaggctttgctgtgtgcaccc

SEQ ID NO: 27608 - RNA, 95 nt, synthetic construct
  source 1..95: mol_type = other RNA
ggtcctgccatttcaccaggaacatgtacacctgggggaaagccagagtcgggggaccccattcagcctccaaagaggctttgctgtgtgcaccc

SEQ ID NO: 27609 - RNA, 96 nt, synthetic construct
  source 1..96: mol_type = other RNA
aggtcctgccatttcaccaggaacatgtacacctgggggaaagccagagtcgggggaccccattcagcctccaaagaggctttgctgtgtgcaccc

SEQ ID NO: 27610 - RNA, 96 nt, synthetic construct
  source 1..96: mol_type = other RNA
aggtcctgccatttcaccaggaacatgtaaacctgggggaaagccagagtcgggggaccccattcagcctccaaagaggctttgctgtgtgcaccc

SEQ ID NO: 27611 - RNA, 96 nt, synthetic construct
  source 1..96: mol_type = other RNA
aggtcctgccatttcaccaggaacatgtagacctgggggaaagccagagtcgggggaccccattcagcctccaaagaggctttgctgtgtgcaccc

SEQ ID NO: 27612 - RNA, 96 nt, synthetic construct
  source 1..96: mol_type = other RNA
aggtcctgccatttcaccaggaacatgtatacctgggggaaagccagagtcgggggaccccattcagcctccaaagaggctttgctgtgtgcaccc

SEQ ID NO: 27613 - RNA, 97 nt, synthetic construct
  source 1..97: mol_type = other RNA
caggtcctgccatttcaccaggaacatgtagacctgggggaaagccagagtcgggggaccccattcagcctccaaagaggctttgctgtgtgcaccc

SEQ ID NO: 27614 - RNA, 97 nt, synthetic construct
  source 1..97: mol_type = other RNA
caggtcctgccatttcaccaggaacatgtacacctgggggaaagccagagtcgggggaccccattcagcctccaaagaggctttgctgtgtgcaccc

SEQ ID NO: 27615 - RNA, 97 nt, synthetic construct
  source 1..97: mol_type = other RNA
caggtcctgccatttcaccaggaacatgtaaacctgggggaaagccagagtcgggggaccccattcagcctccaaagaggctttgctgtgtgcaccc

SEQ ID NO: 27616 - RNA, 97 nt, synthetic construct
  source 1..97: mol_type = other RNA
caggtcctgccatttcaccaggaacatgtatacctgggggaaagccagagtcgggggaccccattcagcctccaaagaggctttgctgtgtgcaccc

SEQ ID NO: 27617 - RNA, 98 nt, synthetic construct
  source 1..98: mol_type = other RNA
acaggtcctgccatttcaccaggaacatgtatacctgggggaaagccagagtcgggggaccccattcagcctccaaagaggctttgctgtgtgcaccc

SEQ ID NO: 27618 - RNA, 98 nt, synthetic construct
  source 1..98: mol_type = other RNA
acaggtcctgccatttcaccaggaacatgtagacctgggggaaagccagagtcgggggaccccattcagcctccaaagaggctttgctgtgtgcaccc

SEQ ID NO: 27619 - RNA, 98 nt, synthetic construct
  source 1..98: mol_type = other RNA
acaggtcctgccatttcaccaggaacatgtacacctgggggaaagccagagtcgggggaccccattcagcctccaaagaggctttgctgtgtgcaccc

SEQ ID NO: 27620 - RNA, 98 nt, synthetic construct
  source 1..98: mol_type = other RNA
acaggtcctgccatttcaccaggaacatgtaaacctgggggaaagccagagtcgggggaccccattcagcctccaaagaggctttgctgtgtgcaccc

SEQ ID NO: 27621 - RNA, 99 nt, synthetic construct
  source 1..99: mol_type = other RNA
gacaggtcctgccatttcaccaggaacatgtacacctgggggaaagccagagtcgggggaccccattcagcctccaaagaggctttgctgtgtgcaccc

SEQ ID NO: 27622 - RNA, 99 nt, synthetic construct
  source 1..99: mol_type = other RNA
gacaggtcctgccatttcaccaggaacatgtatacctgggggaaagccagagtcgggggaccccattcagcctccaaagaggctttgctgtgtgcaccc

SEQ ID NO: 27623 - RNA, 99 nt, synthetic construct
  source 1..99: mol_type = other RNA
gacaggtcctgccatttcaccaggaacatgtagacctgggggaaagccagagtcgggggaccccattcagcctccaaagaggctttgctgtgtgcaccc

SEQ ID NO: 27624 - RNA, 99 nt, synthetic construct
  source 1..99: mol_type = other RNA
gacaggtcctgccatttcaccaggaacatgtaaacctgggggaaagccagagtcgggggaccccattcagcctccaaagaggctttgctgtgtgcaccc

SEQ ID NO: 27625 - RNA, 100 nt, synthetic construct
  source 1..100: mol_type = other RNA
cgacaggtcctgccatttcaccaggaacatgtaaacctgggggaaagccagagtcgggggaccccattcagcctccaaagaggctttgctgtgtgcaccc

SEQ ID NO: 27626 - RNA, 100 nt, synthetic construct
  source 1..100: mol_type = other RNA
cgacaggtcctgccatttcaccaggaacatgtacacctgggggaaagccagagtcgggggaccccattcagcctccaaagaggctttgctgtgtgcaccc

SEQ ID NO: 27627 - RNA, 100 nt, synthetic construct
  source 1..100: mol_type = other RNA
cgacaggtcctgccatttcaccaggaacatgtagacctgggggaaagccagagtcgggggaccccattcagcctccaaagaggctttgctgtgtgcaccc

SEQ ID NO: 27628 - RNA, 100 nt, synthetic construct
  source 1..100: mol_type = other RNA
cgacaggtcctgccatttcaccaggaacatgtatacctgggggaaagccagagtcgggggaccccattcagcctccaaagaggctttgctgtgtgcaccc

SEQ ID NO: 27629 - RNA, 101 nt, synthetic construct
  source 1..101: mol_type = other RNA
ccgacaggtcctgccatttcaccaggaacatgtatacctgggggaaagccagagtcgggggaccccattcagcctccaaagaggctttgctgtgtgcaccc

SEQ ID NO: 27630 - RNA, 101 nt, synthetic construct
  source 1..101: mol_type = other RNA
ccgacaggtcctgccatttcaccaggaacatgtagacctgggggaaagccagagtcgggggaccccattcagcctccaaagaggctttgctgtgtgcaccc

SEQ ID NO: 27631 - RNA, 101 nt, synthetic construct
  source 1..101: mol_type = other RNA
ccgacaggtcctgccatttcaccaggaacatgtaaacctgggggaaagccagagtcgggggaccccattcagcctccaaagaggctttgctgtgtgcaccc

SEQ ID NO: 27632 - RNA, 101 nt, synthetic construct
  source 1..101: mol_type = other RNA
ccgacaggtcctgccatttcaccaggaacatgtacacctgggggaaagccagagtcgggggaccccattcagcctccaaagaggctttgctgtgtgcaccc

SEQ ID NO: 27633 - RNA, 102 nt, synthetic construct
  source 1..102: mol_type = other RNA
tccgacaggtcctgccatttcaccaggaacatgtatacctgggggaaagccagagtcgggggaccccattcagcctccaaagaggctttgctgtgtgcaccc

SEQ ID NO: 27634 - RNA, 102 nt, synthetic construct
  source 1..102: mol_type = other RNA
tccgacaggtcctgccatttcaccaggaacatgtagacctgggggaaagccagagtcgggggaccccattcagcctccaaagaggctttgctgtgtgcaccc

SEQ ID NO: 27635 - RNA, 102 nt, synthetic construct
  source 1..102: mol_type = other RNA
tccgacaggtcctgccatttcaccaggaacatgtacacctgggggaaagccagagtcgggggaccccattcagcctccaaagaggctttgctgtgtgcaccc

SEQ ID NO: 27636 - RNA, 102 nt, synthetic construct
  source 1..102: mol_type = other RNA
tccgacaggtcctgccatttcaccaggaacatgtaaacctgggggaaagccagagtcgggggaccccattcagcctccaaagaggctttgctgtgtgcaccc

SEQ ID NO: 27637 - RNA, 103 nt, synthetic construct
  source 1..103: mol_type = other RNA
ctccgacaggtcctgccatttcaccaggaacatgtacacctgggggaaagccagagtcgggggaccccattcagcctccaaagaggctttgctgtgtgcaccc

SEQ ID NO: 27638 - RNA, 103 nt, synthetic construct
  source 1..103: mol_type = other RNA
ctccgacaggtcctgccatttcaccaggaacatgtaaacctgggggaaagccagagtcgggggaccccattcagcctccaaagaggctttgctgtgtgcaccc

SEQ ID NO: 27639 - RNA, 103 nt, synthetic construct
  source 1..103: mol_type = other RNA
ctccgacaggtcctgccatttcaccaggaacatgtagacctgggggaaagccagagtcgggggaccccattcagcctccaaagaggctttgctgtgtgcaccc

SEQ ID NO: 27640 - RNA, 103 nt, synthetic construct
  source 1..103: mol_type = other RNA
ctccgacaggtcctgccatttcaccaggaacatgtatacctgggggaaagccagagtcgggggaccccattcagcctccaaagaggctttgctgtgtgcaccc

SEQ ID NO: 27641 - RNA, 16 nt, synthetic construct
  source 1..16: mol_type = other RNA
tttggaggctgaatgg

SEQ ID NO: 27642 - RNA, 17 nt, synthetic construct
  source 1..17: mol_type = other RNA
ctttggaggctgaatgg

SEQ ID NO: 27643 - RNA, 18 nt, synthetic construct
  source 1..18: mol_type = other RNA
tctttggaggctgaatgg

SEQ ID NO: 27644 - RNA, 19 nt, synthetic construct
  source 1..19: mol_type = other RNA
ctctttggaggctgaatgg

SEQ ID NO: 27645 - RNA, 20 nt, synthetic construct
  source 1..20: mol_type = other RNA
cctctttggaggctgaatgg

SEQ ID NO: 27646 - RNA, 21 nt, synthetic construct
  source 1..21: mol_type = other RNA
gcctctttggaggctgaatgg

SEQ ID NO: 27647 - RNA, 22 nt, synthetic construct
  source 1..22: mol_type = other RNA
agcctctttggaggctgaatgg

SEQ ID NO: 27648-27652 - skipped (5 entries)

SEQ ID NO: 27653 - RNA, 10 nt, synthetic construct
  source 1..10: mol_type = other RNA
ttcagcctcc

SEQ ID NO: 27654 - RNA, 11 nt, synthetic construct
  source 1..11: mol_type = other RNA
ttcagcctcca

SEQ ID NO: 27655 - RNA, 12 nt, synthetic construct
  source 1..12: mol_type = other RNA
ttcagcctccaa

SEQ ID NO: 27656 - RNA, 13 nt, synthetic construct
  source 1..13: mol_type = other RNA
ttcagcctccaaa

SEQ ID NO: 27657 - RNA, 14 nt, synthetic construct
  source 1..14: mol_type = other RNA
ttcagcctccaaag

SEQ ID NO: 27658 - RNA, 15 nt, synthetic construct
  source 1..15: mol_type = other RNA
ttcagcctccaaaga

SEQ ID NO: 27659 - RNA, 16 nt, synthetic construct
  source 1..16: mol_type = other RNA
ttcagcctccaaagag

SEQ ID NO: 27660 - RNA, 17 nt, synthetic construct
  source 1..17: mol_type = other RNA
ttcagcctccaaagagg

SEQ ID NO: 27661 - RNA, 18 nt, synthetic construct
  source 1..18: mol_type = other RNA
ttcagcctccaaagaggc

SEQ ID NO: 27662 - RNA, 19 nt, synthetic construct
  source 1..19: mol_type = other RNA
ttcagcctccaaagaggct

SEQ ID NO: 27663 - RNA, 32 nt, synthetic construct
  source 1..32: mol_type = other RNA
acctgggggaaagccagagtcgggggacccca

SEQ ID NO: 27664 - RNA, 33 nt, synthetic construct
  source 1..33: mol_type = other RNA
gacctgggggaaagccagagtcgggggacccca

SEQ ID NO: 27665 - RNA, 33 nt, synthetic construct
  source 1..33: mol_type = other RNA
cacctgggggaaagccagagtcgggggacccca

SEQ ID NO: 27666 - RNA, 33 nt, synthetic construct
  source 1..33: mol_type = other RNA
aacctgggggaaagccagagtcgggggacccca

SEQ ID NO: 27667 - RNA, 33 nt, synthetic construct
  source 1..33: mol_type = other RNA
tacctgggggaaagccagagtcgggggacccca

SEQ ID NO: 27668 - RNA, 34 nt, synthetic construct
  source 1..34: mol_type = other RNA
agacctgggggaaagccagagtcgggggacccca

SEQ ID NO: 27669 - RNA, 34 nt, synthetic construct
  source 1..34: mol_type = other RNA
acacctgggggaaagccagagtcgggggacccca

SEQ ID NO: 27670 - RNA, 34 nt, synthetic construct
  source 1..34: mol_type = other RNA
aaacctgggggaaagccagagtcgggggacccca

SEQ ID NO: 27671 - RNA, 34 nt, synthetic construct
  source 1..34: mol_type = other RNA
atacctgggggaaagccagagtcgggggacccca

SEQ ID NO: 27672 - RNA, 35 nt, synthetic construct
  source 1..35: mol_type = other RNA
taaacctgggggaaagccagagtcgggggacccca

SEQ ID NO: 27673 - RNA, 35 nt, synthetic construct
  source 1..35: mol_type = other RNA
tacacctgggggaaagccagagtcgggggacccca

SEQ ID NO: 27674 - RNA, 35 nt, synthetic construct
  source 1..35: mol_type = other RNA
tatacctgggggaaagccagagtcgggggacccca

SEQ ID NO: 27675 - RNA, 35 nt, synthetic construct
  source 1..35: mol_type = other RNA
tagacctgggggaaagccagagtcgggggacccca

SEQ ID NO: 27676 - RNA, 36 nt, synthetic construct
  source 1..36: mol_type = other RNA
gtatacctgggggaaagccagagtcgggggacccca

SEQ ID NO: 27677 - RNA, 36 nt, synthetic construct
  source 1..36: mol_type = other RNA
gtagacctgggggaaagccagagtcgggggacccca

SEQ ID NO: 27678 - RNA, 36 nt, synthetic construct
  source 1..36: mol_type = other RNA
gtacacctgggggaaagccagagtcgggggacccca

SEQ ID NO: 27679 - RNA, 36 nt, synthetic construct
  source 1..36: mol_type = other RNA
gtaaacctgggggaaagccagagtcgggggacccca

SEQ ID NO: 27680 - RNA, 37 nt, synthetic construct
  source 1..37: mol_type = other RNA
tgtatacctgggggaaagccagagtcgggggacccca

SEQ ID NO: 27681 - RNA, 37 nt, synthetic construct
  source 1..37: mol_type = other RNA
tgtagacctgggggaaagccagagtcgggggacccca

SEQ ID NO: 27682 - RNA, 37 nt, synthetic construct
  source 1..37: mol_type = other RNA
tgtacacctgggggaaagccagagtcgggggacccca

SEQ ID NO: 27683 - RNA, 37 nt, synthetic construct
  source 1..37: mol_type = other RNA
tgtaaacctgggggaaagccagagtcgggggacccca

SEQ ID NO: 27684 - RNA, 38 nt, synthetic construct
  source 1..38: mol_type = other RNA
atgtacacctgggggaaagccagagtcgggggacccca

SEQ ID NO: 27685 - RNA, 38 nt, synthetic construct
  source 1..38: mol_type = other RNA
atgtagacctgggggaaagccagagtcgggggacccca

SEQ ID NO: 27686 - RNA, 38 nt, synthetic construct
  source 1..38: mol_type = other RNA
atgtatacctgggggaaagccagagtcgggggacccca

SEQ ID NO: 27687 - RNA, 38 nt, synthetic construct
  source 1..38: mol_type = other RNA
atgtaaacctgggggaaagccagagtcgggggacccca

SEQ ID NO: 27688 - RNA, 39 nt, synthetic construct
  source 1..39: mol_type = other RNA
catgtagacctgggggaaagccagagtcgggggacccca

SEQ ID NO: 27689 - RNA, 39 nt, synthetic construct
  source 1..39: mol_type = other RNA
catgtatacctgggggaaagccagagtcgggggacccca

SEQ ID NO: 27690 - RNA, 39 nt, synthetic construct
  source 1..39: mol_type = other RNA
catgtacacctgggggaaagccagagtcgggggacccca

SEQ ID NO: 27691 - RNA, 39 nt, synthetic construct
  source 1..39: mol_type = other RNA
catgtaaacctgggggaaagccagagtcgggggacccca

SEQ ID NO: 27692 - RNA, 40 nt, synthetic construct
  source 1..40: mol_type = other RNA
acatgtaaacctgggggaaagccagagtcgggggacccca

SEQ ID NO: 27693 - RNA, 40 nt, synthetic construct
  source 1..40: mol_type = other RNA
acatgtacacctgggggaaagccagagtcgggggacccca

SEQ ID NO: 27694 - RNA, 40 nt, synthetic construct
  source 1..40: mol_type = other RNA
acatgtatacctgggggaaagccagagtcgggggacccca

SEQ ID NO: 27695 - RNA, 40 nt, synthetic construct
  source 1..40: mol_type = other RNA
acatgtagacctgggggaaagccagagtcgggggacccca

SEQ ID NO: 27696 - RNA, 41 nt, synthetic construct
  source 1..41: mol_type = other RNA
aacatgtatacctgggggaaagccagagtcgggggacccca

SEQ ID NO: 27697 - RNA, 41 nt, synthetic construct
  source 1..41: mol_type = other RNA
aacatgtagacctgggggaaagccagagtcgggggacccca

SEQ ID NO: 27698 - RNA, 41 nt, synthetic construct
  source 1..41: mol_type = other RNA
aacatgtaaacctgggggaaagccagagtcgggggacccca

SEQ ID NO: 27699 - RNA, 41 nt, synthetic construct
  source 1..41: mol_type = other RNA
aacatgtacacctgggggaaagccagagtcgggggacccca

SEQ ID NO: 27700 - RNA, 42 nt, synthetic construct
  source 1..42: mol_type = other RNA
gaacatgtatacctgggggaaagccagagtcgggggacccca

SEQ ID NO: 27701 - RNA, 42 nt, synthetic construct
  source 1..42: mol_type = other RNA
gaacatgtaaacctgggggaaagccagagtcgggggacccca

SEQ ID NO: 27702 - RNA, 42 nt, synthetic construct
  source 1..42: mol_type = other RNA
gaacatgtagacctgggggaaagccagagtcgggggacccca

SEQ ID NO: 27703 - RNA, 42 nt, synthetic construct
  source 1..42: mol_type = other RNA
gaacatgtacacctgggggaaagccagagtcgggggacccca

SEQ ID NO: 27704 - RNA, 43 nt, synthetic construct
  source 1..43: mol_type = other RNA
ggaacatgtacacctgggggaaagccagagtcgggggacccca

SEQ ID NO: 27705 - RNA, 43 nt, synthetic construct
  source 1..43: mol_type = other RNA
ggaacatgtatacctgggggaaagccagagtcgggggacccca

SEQ ID NO: 27706 - RNA, 43 nt, synthetic construct
  source 1..43: mol_type = other RNA
ggaacatgtagacctgggggaaagccagagtcgggggacccca

SEQ ID NO: 27707 - RNA, 43 nt, synthetic construct
  source 1..43: mol_type = other RNA
ggaacatgtaaacctgggggaaagccagagtcgggggacccca

SEQ ID NO: 27708 - RNA, 44 nt, synthetic construct
  source 1..44: mol_type = other RNA
aggaacatgtacacctgggggaaagccagagtcgggggacccca

SEQ ID NO: 27709 - RNA, 44 nt, synthetic construct
  source 1..44: mol_type = other RNA
aggaacatgtatacctgggggaaagccagagtcgggggacccca

SEQ ID NO: 27710 - RNA, 44 nt, synthetic construct
  source 1..44: mol_type = other RNA
aggaacatgtaaacctgggggaaagccagagtcgggggacccca

SEQ ID NO: 27711 - RNA, 44 nt, synthetic construct
  source 1..44: mol_type = other RNA
aggaacatgtagacctgggggaaagccagagtcgggggacccca

SEQ ID NO: 27712 - RNA, 45 nt, synthetic construct
  source 1..45: mol_type = other RNA
caggaacatgtagacctgggggaaagccagagtcgggggacccca

SEQ ID NO: 27713 - RNA, 45 nt, synthetic construct
  source 1..45: mol_type = other RNA
caggaacatgtacacctgggggaaagccagagtcgggggacccca

SEQ ID NO: 27714 - RNA, 45 nt, synthetic construct
  source 1..45: mol_type = other RNA
caggaacatgtaaacctgggggaaagccagagtcgggggacccca

SEQ ID NO: 27715 - RNA, 45 nt, synthetic construct
  source 1..45: mol_type = other RNA
caggaacatgtatacctgggggaaagccagagtcgggggacccca

SEQ ID NO: 27716 - RNA, 46 nt, synthetic construct
  source 1..46: mol_type = other RNA
ccaggaacatgtatacctgggggaaagccagagtcgggggacccca

SEQ ID NO: 27717 - RNA, 46 nt, synthetic construct
  source 1..46: mol_type = other RNA
ccaggaacatgtaaacctgggggaaagccagagtcgggggacccca

SEQ ID NO: 27718 - RNA, 46 nt, synthetic construct
  source 1..46: mol_type = other RNA
ccaggaacatgtacacctgggggaaagccagagtcgggggacccca

SEQ ID NO: 27719 - RNA, 46 nt, synthetic construct
  source 1..46: mol_type = other RNA
ccaggaacatgtagacctgggggaaagccagagtcgggggacccca

SEQ ID NO: 27720 - RNA, 47 nt, synthetic construct
  source 1..47: mol_type = other RNA
accaggaacatgtaaacctgggggaaagccagagtcgggggacccca

SEQ ID NO: 27721 - RNA, 47 nt, synthetic construct
  source 1..47: mol_type = other RNA
accaggaacatgtatacctgggggaaagccagagtcgggggacccca

SEQ ID NO: 27722 - RNA, 47 nt, synthetic construct
  source 1..47: mol_type = other RNA
accaggaacatgtagacctgggggaaagccagagtcgggggacccca

SEQ ID NO: 27723 - RNA, 47 nt, synthetic construct
  source 1..47: mol_type = other RNA
accaggaacatgtacacctgggggaaagccagagtcgggggacccca

SEQ ID NO: 27724 - RNA, 48 nt, synthetic construct
  source 1..48: mol_type = other RNA
caccaggaacatgtaaacctgggggaaagccagagtcgggggacccca

SEQ ID NO: 27725 - RNA, 48 nt, synthetic construct
  source 1..48: mol_type = other RNA
caccaggaacatgtatacctgggggaaagccagagtcgggggacccca

SEQ ID NO: 27726 - RNA, 48 nt, synthetic construct
  source 1..48: mol_type = other RNA
caccaggaacatgtagacctgggggaaagccagagtcgggggacccca

SEQ ID NO: 27727 - RNA, 48 nt, synthetic construct
  source 1..48: mol_type = other RNA
caccaggaacatgtacacctgggggaaagccagagtcgggggacccca

SEQ ID NO: 27728 - RNA, 49 nt, synthetic construct
  source 1..49: mol_type = other RNA
tcaccaggaacatgtaaacctgggggaaagccagagtcgggggacccca

SEQ ID NO: 27729 - RNA, 49 nt, synthetic construct
  source 1..49: mol_type = other RNA
tcaccaggaacatgtacacctgggggaaagccagagtcgggggacccca

SEQ ID NO: 27730 - RNA, 49 nt, synthetic construct
  source 1..49: mol_type = other RNA
tcaccaggaacatgtagacctgggggaaagccagagtcgggggacccca

SEQ ID NO: 27731 - RNA, 49 nt, synthetic construct
  source 1..49: mol_type = other RNA
tcaccaggaacatgtatacctgggggaaagccagagtcgggggacccca

SEQ ID NO: 27732 - RNA, 50 nt, synthetic construct
  source 1..50: mol_type = other RNA
ttcaccaggaacatgtagacctgggggaaagccagagtcgggggacccca

SEQ ID NO: 27733 - RNA, 50 nt, synthetic construct
  source 1..50: mol_type = other RNA
ttcaccaggaacatgtatacctgggggaaagccagagtcgggggacccca

SEQ ID NO: 27734 - RNA, 50 nt, synthetic construct
  source 1..50: mol_type = other RNA
ttcaccaggaacatgtacacctgggggaaagccagagtcgggggacccca

SEQ ID NO: 27735 - RNA, 50 nt, synthetic construct
  source 1..50: mol_type = other RNA
ttcaccaggaacatgtaaacctgggggaaagccagagtcgggggacccca

SEQ ID NO: 27736 - RNA, 51 nt, synthetic construct
  source 1..51: mol_type = other RNA
tttcaccaggaacatgtaaacctgggggaaagccagagtcgggggacccca

SEQ ID NO: 27737 - RNA, 51 nt, synthetic construct
  source 1..51: mol_type = other RNA
tttcaccaggaacatgtacacctgggggaaagccagagtcgggggacccca

SEQ ID NO: 27738 - RNA, 51 nt, synthetic construct
  source 1..51: mol_type = other RNA
tttcaccaggaacatgtagacctgggggaaagccagagtcgggggacccca

SEQ ID NO: 27739 - RNA, 51 nt, synthetic construct
  source 1..51: mol_type = other RNA
tttcaccaggaacatgtatacctgggggaaagccagagtcgggggacccca

SEQ ID NO: 27740 - RNA, 52 nt, synthetic construct
  source 1..52: mol_type = other RNA
atttcaccaggaacatgtatacctgggggaaagccagagtcgggggacccca

SEQ ID NO: 27741 - RNA, 52 nt, synthetic construct
  source 1..52: mol_type = other RNA
atttcaccaggaacatgtagacctgggggaaagccagagtcgggggacccca

SEQ ID NO: 27742 - RNA, 52 nt, synthetic construct
  source 1..52: mol_type = other RNA
atttcaccaggaacatgtacacctgggggaaagccagagtcgggggacccca

SEQ ID NO: 27743 - RNA, 52 nt, synthetic construct
  source 1..52: mol_type = other RNA
atttcaccaggaacatgtaaacctgggggaaagccagagtcgggggacccca

SEQ ID NO: 27744 - RNA, 53 nt, synthetic construct
  source 1..53: mol_type = other RNA
catttcaccaggaacatgtagacctgggggaaagccagagtcgggggacccca

SEQ ID NO: 27745 - RNA, 53 nt, synthetic construct
  source 1..53: mol_type = other RNA
catttcaccaggaacatgtacacctgggggaaagccagagtcgggggacccca

SEQ ID NO: 27746 - RNA, 53 nt, synthetic construct
  source 1..53: mol_type = other RNA
catttcaccaggaacatgtatacctgggggaaagccagagtcgggggacccca

SEQ ID NO: 27747 - RNA, 53 nt, synthetic construct
  source 1..53: mol_type = other RNA
catttcaccaggaacatgtaaacctgggggaaagccagagtcgggggacccca

SEQ ID NO: 27748 - RNA, 54 nt, synthetic construct
  source 1..54: mol_type = other RNA
ccatttcaccaggaacatgtaaacctgggggaaagccagagtcgggggacccca

SEQ ID NO: 27749 - RNA, 54 nt, synthetic construct
  source 1..54: mol_type = other RNA
ccatttcaccaggaacatgtagacctgggggaaagccagagtcgggggacccca

SEQ ID NO: 27750 - RNA, 54 nt, synthetic construct
  source 1..54: mol_type = other RNA
ccatttcaccaggaacatgtatacctgggggaaagccagagtcgggggacccca

SEQ ID NO: 27751 - RNA, 54 nt, synthetic construct
  source 1..54: mol_type = other RNA
ccatttcaccaggaacatgtacacctgggggaaagccagagtcgggggacccca

SEQ ID NO: 27752 - RNA, 55 nt, synthetic construct
  source 1..55: mol_type = other RNA
gccatttcaccaggaacatgtaaacctgggggaaagccagagtcgggggacccca

SEQ ID NO: 27753 - RNA, 55 nt, synthetic construct
  source 1..55: mol_type = other RNA
gccatttcaccaggaacatgtagacctgggggaaagccagagtcgggggacccca

SEQ ID NO: 27754 - RNA, 55 nt, synthetic construct
  source 1..55: mol_type = other RNA
gccatttcaccaggaacatgtatacctgggggaaagccagagtcgggggacccca

SEQ ID NO: 27755 - RNA, 55 nt, synthetic construct
  source 1..55: mol_type = other RNA
gccatttcaccaggaacatgtacacctgggggaaagccagagtcgggggacccca

SEQ ID NO: 27756 - RNA, 56 nt, synthetic construct
  source 1..56: mol_type = other RNA
tgccatttcaccaggaacatgtatacctgggggaaagccagagtcgggggacccca

SEQ ID NO: 27757 - RNA, 56 nt, synthetic construct
  source 1..56: mol_type = other RNA
tgccatttcaccaggaacatgtaaacctgggggaaagccagagtcgggggacccca

SEQ ID NO: 27758 - RNA, 56 nt, synthetic construct
  source 1..56: mol_type = other RNA
tgccatttcaccaggaacatgtacacctgggggaaagccagagtcgggggacccca

SEQ ID NO: 27759 - RNA, 56 nt, synthetic construct
  source 1..56: mol_type = other RNA
tgccatttcaccaggaacatgtagacctgggggaaagccagagtcgggggacccca

SEQ ID NO: 27760 - RNA, 57 nt, synthetic construct
  source 1..57: mol_type = other RNA
ctgccatttcaccaggaacatgtaaacctgggggaaagccagagtcgggggacccca

SEQ ID NO: 27761 - RNA, 57 nt, synthetic construct
  source 1..57: mol_type = other RNA
ctgccatttcaccaggaacatgtatacctgggggaaagccagagtcgggggacccca

SEQ ID NO: 27762 - RNA, 57 nt, synthetic construct
  source 1..57: mol_type = other RNA
ctgccatttcaccaggaacatgtacacctgggggaaagccagagtcgggggacccca

SEQ ID NO: 27763 - RNA, 57 nt, synthetic construct
  source 1..57: mol_type = other RNA
ctgccatttcaccaggaacatgtagacctgggggaaagccagagtcgggggacccca

SEQ ID NO: 27764 - RNA, 58 nt, synthetic construct
  source 1..58: mol_type = other RNA
cctgccatttcaccaggaacatgtaaacctgggggaaagccagagtcgggggacccca

SEQ ID NO: 27765 - RNA, 58 nt, synthetic construct
  source 1..58: mol_type = other RNA
cctgccatttcaccaggaacatgtatacctgggggaaagccagagtcgggggacccca

SEQ ID NO: 27766 - RNA, 58 nt, synthetic construct
  source 1..58: mol_type = other RNA
cctgccatttcaccaggaacatgtacacctgggggaaagccagagtcgggggacccca

SEQ ID NO: 27767 - RNA, 58 nt, synthetic construct
  source 1..58: mol_type = other RNA
cctgccatttcaccaggaacatgtagacctgggggaaagccagagtcgggggacccca

SEQ ID NO: 27768 - RNA, 59 nt, synthetic construct
  source 1..59: mol_type = other RNA
tcctgccatttcaccaggaacatgtagacctgggggaaagccagagtcgggggacccca

SEQ ID NO: 27769 - RNA, 59 nt, synthetic construct
  source 1..59: mol_type = other RNA
tcctgccatttcaccaggaacatgtatacctgggggaaagccagagtcgggggacccca

SEQ ID NO: 27770 - RNA, 59 nt, synthetic construct
  source 1..59: mol_type = other RNA
tcctgccatttcaccaggaacatgtacacctgggggaaagccagagtcgggggacccca

SEQ ID NO: 27771 - RNA, 59 nt, synthetic construct
  source 1..59: mol_type = other RNA
tcctgccatttcaccaggaacatgtaaacctgggggaaagccagagtcgggggacccca

SEQ ID NO: 27772 - RNA, 60 nt, synthetic construct
  source 1..60: mol_type = other RNA
gtcctgccatttcaccaggaacatgtaaacctgggggaaagccagagtcgggggacccca

SEQ ID NO: 27773 - RNA, 60 nt, synthetic construct
  source 1..60: mol_type = other RNA
gtcctgccatttcaccaggaacatgtacacctgggggaaagccagagtcgggggacccca

SEQ ID NO: 27774 - RNA, 60 nt, synthetic construct
  source 1..60: mol_type = other RNA
gtcctgccatttcaccaggaacatgtagacctgggggaaagccagagtcgggggacccca

SEQ ID NO: 27775 - RNA, 60 nt, synthetic construct
  source 1..60: mol_type = other RNA
gtcctgccatttcaccaggaacatgtatacctgggggaaagccagagtcgggggacccca

SEQ ID NO: 27776 - RNA, 61 nt, synthetic construct
  source 1..61: mol_type = other RNA
ggtcctgccatttcaccaggaacatgtacacctgggggaaagccagagtcgggggacccca

SEQ ID NO: 27777 - RNA, 61 nt, synthetic construct
  source 1..61: mol_type = other RNA
ggtcctgccatttcaccaggaacatgtagacctgggggaaagccagagtcgggggacccca

SEQ ID NO: 27778 - RNA, 61 nt, synthetic construct
  source 1..61: mol_type = other RNA
ggtcctgccatttcaccaggaacatgtaaacctgggggaaagccagagtcgggggacccca

SEQ ID NO: 27779 - RNA, 61 nt, synthetic construct
  source 1..61: mol_type = other RNA
ggtcctgccatttcaccaggaacatgtatacctgggggaaagccagagtcgggggacccca

SEQ ID NO: 27780 - RNA, 62 nt, synthetic construct
  source 1..62: mol_type = other RNA
aggtcctgccatttcaccaggaacatgtaaacctgggggaaagccagagtcgggggacccca

SEQ ID NO: 27781 - RNA, 62 nt, synthetic construct
  source 1..62: mol_type = other RNA
aggtcctgccatttcaccaggaacatgtatacctgggggaaagccagagtcgggggacccca

SEQ ID NO: 27782 - RNA, 62 nt, synthetic construct
  source 1..62: mol_type = other RNA
aggtcctgccatttcaccaggaacatgtagacctgggggaaagccagagtcgggggacccca

SEQ ID NO: 27783 - RNA, 62 nt, synthetic construct
  source 1..62: mol_type = other RNA
aggtcctgccatttcaccaggaacatgtacacctgggggaaagccagagtcgggggacccca

SEQ ID NO: 27784 - RNA, 63 nt, synthetic construct
  source 1..63: mol_type = other RNA
caggtcctgccatttcaccaggaacatgtagacctgggggaaagccagagtcgggggacccca

SEQ ID NO: 27785 - RNA, 63 nt, synthetic construct
  source 1..63: mol_type = other RNA
caggtcctgccatttcaccaggaacatgtacacctgggggaaagccagagtcgggggacccca

SEQ ID NO: 27786 - RNA, 63 nt, synthetic construct
  source 1..63: mol_type = other RNA
caggtcctgccatttcaccaggaacatgtaaacctgggggaaagccagagtcgggggacccca

SEQ ID NO: 27787 - RNA, 63 nt, synthetic construct
  source 1..63: mol_type = other RNA
caggtcctgccatttcaccaggaacatgtatacctgggggaaagccagagtcgggggacccca

SEQ ID NO: 27788 - RNA, 64 nt, synthetic construct
  source 1..64: mol_type = other RNA
acaggtcctgccatttcaccaggaacatgtacacctgggggaaagccagagtcgggggacccca

SEQ ID NO: 27789 - RNA, 64 nt, synthetic construct
  source 1..64: mol_type = other RNA
acaggtcctgccatttcaccaggaacatgtaaacctgggggaaagccagagtcgggggacccca

SEQ ID NO: 27790 - RNA, 64 nt, synthetic construct
  source 1..64: mol_type = other RNA
acaggtcctgccatttcaccaggaacatgtatacctgggggaaagccagagtcgggggacccca

SEQ ID NO: 27791 - RNA, 64 nt, synthetic construct
  source 1..64: mol_type = other RNA
acaggtcctgccatttcaccaggaacatgtagacctgggggaaagccagagtcgggggacccca

SEQ ID NO: 27792 - RNA, 65 nt, synthetic construct
  source 1..65: mol_type = other RNA
gacaggtcctgccatttcaccaggaacatgtatacctgggggaaagccagagtcgggggacccca

SEQ ID NO: 27793 - RNA, 65 nt, synthetic construct
  source 1..65: mol_type = other RNA
gacaggtcctgccatttcaccaggaacatgtagacctgggggaaagccagagtcgggggacccca

SEQ ID NO: 27794 - RNA, 65 nt, synthetic construct
  source 1..65: mol_type = other RNA
gacaggtcctgccatttcaccaggaacatgtacacctgggggaaagccagagtcgggggacccca

SEQ ID NO: 27795 - RNA, 65 nt, synthetic construct
  source 1..65: mol_type = other RNA
gacaggtcctgccatttcaccaggaacatgtaaacctgggggaaagccagagtcgggggacccca

SEQ ID NO: 27796 - RNA, 66 nt, synthetic construct
  source 1..66: mol_type = other RNA
cgacaggtcctgccatttcaccaggaacatgtaaacctgggggaaagccagagtcgggggacccca

SEQ ID NO: 27797 - RNA, 66 nt, synthetic construct
  source 1..66: mol_type = other RNA
cgacaggtcctgccatttcaccaggaacatgtagacctgggggaaagccagagtcgggggacccca

SEQ ID NO: 27798 - RNA, 66 nt, synthetic construct
  source 1..66: mol_type = other RNA
cgacaggtcctgccatttcaccaggaacatgtacacctgggggaaagccagagtcgggggacccca

SEQ ID NO: 27799 - RNA, 66 nt, synthetic construct
  source 1..66: mol_type = other RNA
cgacaggtcctgccatttcaccaggaacatgtatacctgggggaaagccagagtcgggggacccca

SEQ ID NO: 27800 - RNA, 67 nt, synthetic construct
  source 1..67: mol_type = other RNA
ccgacaggtcctgccatttcaccaggaacatgtagacctgggggaaagccagagtcgggggacccca

SEQ ID NO: 27801 - RNA, 67 nt, synthetic construct
  source 1..67: mol_type = other RNA
ccgacaggtcctgccatttcaccaggaacatgtatacctgggggaaagccagagtcgggggacccca

SEQ ID NO: 27802 - RNA, 67 nt, synthetic construct
  source 1..67: mol_type = other RNA
ccgacaggtcctgccatttcaccaggaacatgtacacctgggggaaagccagagtcgggggacccca

SEQ ID NO: 27803 - RNA, 67 nt, synthetic construct
  source 1..67: mol_type = other RNA
ccgacaggtcctgccatttcaccaggaacatgtaaacctgggggaaagccagagtcgggggacccca

SEQ ID NO: 27804 - RNA, 68 nt, synthetic construct
  source 1..68: mol_type = other RNA
tccgacaggtcctgccatttcaccaggaacatgtaaacctgggggaaagccagagtcgggggacccca

SEQ ID NO: 27805 - RNA, 68 nt, synthetic construct
  source 1..68: mol_type = other RNA
tccgacaggtcctgccatttcaccaggaacatgtagacctgggggaaagccagagtcgggggacccca

SEQ ID NO: 27806 - RNA, 68 nt, synthetic construct
  source 1..68: mol_type = other RNA
tccgacaggtcctgccatttcaccaggaacatgtacacctgggggaaagccagagtcgggggacccca

SEQ ID NO: 27807 - RNA, 68 nt, synthetic construct
  source 1..68: mol_type = other RNA
tccgacaggtcctgccatttcaccaggaacatgtatacctgggggaaagccagagtcgggggacccca

SEQ ID NO: 27808 - RNA, 69 nt, synthetic construct
  source 1..69: mol_type = other RNA
ctccgacaggtcctgccatttcaccaggaacatgtagacctgggggaaagccagagtcgggggacccca

SEQ ID NO: 27809 - RNA, 69 nt, synthetic construct
  source 1..69: mol_type = other RNA
ctccgacaggtcctgccatttcaccaggaacatgtatacctgggggaaagccagagtcgggggacccca

SEQ ID NO: 27810 - RNA, 69 nt, synthetic construct
  source 1..69: mol_type = other RNA
ctccgacaggtcctgccatttcaccaggaacatgtaaacctgggggaaagccagagtcgggggacccca

SEQ ID NO: 27811 - RNA, 69 nt, synthetic construct
  source 1..69: mol_type = other RNA
ctccgacaggtcctgccatttcaccaggaacatgtacacctgggggaaagccagagtcgggggacccca

SEQ ID NO: 27812 - RNA, 70 nt, synthetic construct
  source 1..70: mol_type = other RNA
tctccgacaggtcctgccatttcaccaggaacatgtatacctgggggaaagccagagtcgggggacccca

SEQ ID NO: 27813 - RNA, 70 nt, synthetic construct
  source 1..70: mol_type = other RNA
tctccgacaggtcctgccatttcaccaggaacatgtagacctgggggaaagccagagtcgggggacccca

SEQ ID NO: 27814 - RNA, 70 nt, synthetic construct
  source 1..70: mol_type = other RNA
tctccgacaggtcctgccatttcaccaggaacatgtacacctgggggaaagccagagtcgggggacccca

SEQ ID NO: 27815 - RNA, 70 nt, synthetic construct
  source 1..70: mol_type = other RNA
tctccgacaggtcctgccatttcaccaggaacatgtaaacctgggggaaagccagagtcgggggacccca

SEQ ID NO: 27816 - RNA, 71 nt, synthetic construct
  source 1..71: mol_type = other RNA
ttctccgacaggtcctgccatttcaccaggaacatgtagacctgggggaaagccagagtcgggggacccca

SEQ ID NO: 27817 - RNA, 71 nt, synthetic construct
  source 1..71: mol_type = other RNA
ttctccgacaggtcctgccatttcaccaggaacatgtacacctgggggaaagccagagtcgggggacccca

SEQ ID NO: 27818 - RNA, 71 nt, synthetic construct
  source 1..71: mol_type = other RNA
ttctccgacaggtcctgccatttcaccaggaacatgtaaacctgggggaaagccagagtcgggggacccca

SEQ ID NO: 27819 - RNA, 71 nt, synthetic construct
  source 1..71: mol_type = other RNA
ttctccgacaggtcctgccatttcaccaggaacatgtatacctgggggaaagccagagtcgggggacccca

SEQ ID NO: 27820 - RNA, 72 nt, synthetic construct
  source 1..72: mol_type = other RNA
cttctccgacaggtcctgccatttcaccaggaacatgtatacctgggggaaagccagagtcgggggacccca

SEQ ID NO: 27821 - RNA, 72 nt, synthetic construct
  source 1..72: mol_type = other RNA
cttctccgacaggtcctgccatttcaccaggaacatgtagacctgggggaaagccagagtcgggggacccca

SEQ ID NO: 27822 - RNA, 72 nt, synthetic construct
  source 1..72: mol_type = other RNA
cttctccgacaggtcctgccatttcaccaggaacatgtaaacctgggggaaagccagagtcgggggacccca

SEQ ID NO: 27823 - RNA, 72 nt, synthetic construct
  source 1..72: mol_type = other RNA
cttctccgacaggtcctgccatttcaccaggaacatgtacacctgggggaaagccagagtcgggggacccca

SEQ ID NO: 27824 - RNA, 73 nt, synthetic construct
  source 1..73: mol_type = other RNA
ccttctccgacaggtcctgccatttcaccaggaacatgtacacctgggggaaagccagagtcgggggacccca

SEQ ID NO: 27825 - RNA, 73 nt, synthetic construct
  source 1..73: mol_type = other RNA
ccttctccgacaggtcctgccatttcaccaggaacatgtagacctgggggaaagccagagtcgggggacccca

SEQ ID NO: 27826 - RNA, 73 nt, synthetic construct
  source 1..73: mol_type = other RNA
ccttctccgacaggtcctgccatttcaccaggaacatgtatacctgggggaaagccagagtcgggggacccca

SEQ ID NO: 27827 - RNA, 73 nt, synthetic construct
  source 1..73: mol_type = other RNA
ccttctccgacaggtcctgccatttcaccaggaacatgtaaacctgggggaaagccagagtcgggggacccca

SEQ ID NO: 27828 - RNA, 74 nt, synthetic construct
  source 1..74: mol_type = other RNA
accttctccgacaggtcctgccatttcaccaggaacatgtagacctgggggaaagccagagtcgggggacccca

SEQ ID NO: 27829 - RNA, 74 nt, synthetic construct
  source 1..74: mol_type = other RNA
accttctccgacaggtcctgccatttcaccaggaacatgtacacctgggggaaagccagagtcgggggacccca

SEQ ID NO: 27830 - RNA, 74 nt, synthetic construct
  source 1..74: mol_type = other RNA
accttctccgacaggtcctgccatttcaccaggaacatgtaaacctgggggaaagccagagtcgggggacccca

SEQ ID NO: 27831 - RNA, 74 nt, synthetic construct
  source 1..74: mol_type = other RNA
accttctccgacaggtcctgccatttcaccaggaacatgtatacctgggggaaagccagagtcgggggacccca

SEQ ID NO: 27832 - RNA, 75 nt, synthetic construct
  source 1..75: mol_type = other RNA
caccttctccgacaggtcctgccatttcaccaggaacatgtacacctgggggaaagccagagtcgggggacccca

SEQ ID NO: 27833 - RNA, 75 nt, synthetic construct
  source 1..75: mol_type = other RNA
caccttctccgacaggtcctgccatttcaccaggaacatgtaaacctgggggaaagccagagtcgggggacccca

SEQ ID NO: 27834 - RNA, 75 nt, synthetic construct
  source 1..75: mol_type = other RNA
caccttctccgacaggtcctgccatttcaccaggaacatgtatacctgggggaaagccagagtcgggggacccca

SEQ ID NO: 27835 - RNA, 75 nt, synthetic construct
  source 1..75: mol_type = other RNA
caccttctccgacaggtcctgccatttcaccaggaacatgtagacctgggggaaagccagagtcgggggacccca

SEQ ID NO: 27836 - RNA, 76 nt, synthetic construct
  source 1..76: mol_type = other RNA
ccaccttctccgacaggtcctgccatttcaccaggaacatgtatacctgggggaaagccagagtcgggggacccca

SEQ ID NO: 27837 - RNA, 76 nt, synthetic construct
  source 1..76: mol_type = other RNA
ccaccttctccgacaggtcctgccatttcaccaggaacatgtaaacctgggggaaagccagagtcgggggacccca

SEQ ID NO: 27838 - RNA, 76 nt, synthetic construct
  source 1..76: mol_type = other RNA
ccaccttctccgacaggtcctgccatttcaccaggaacatgtagacctgggggaaagccagagtcgggggacccca

SEQ ID NO: 27839 - RNA, 76 nt, synthetic construct
  source 1..76: mol_type = other RNA
ccaccttctccgacaggtcctgccatttcaccaggaacatgtacacctgggggaaagccagagtcgggggacccca

SEQ ID NO: 27840 - RNA, 77 nt, synthetic construct
  source 1..77: mol_type = other RNA
accaccttctccgacaggtcctgccatttcaccaggaacatgtatacctgggggaaagccagagtcgggggacccca

SEQ ID NO: 27841 - RNA, 77 nt, synthetic construct
  source 1..77: mol_type = other RNA
accaccttctccgacaggtcctgccatttcaccaggaacatgtagacctgggggaaagccagagtcgggggacccca

SEQ ID NO: 27842 - RNA, 77 nt, synthetic construct
  source 1..77: mol_type = other RNA
accaccttctccgacaggtcctgccatttcaccaggaacatgtacacctgggggaaagccagagtcgggggacccca

SEQ ID NO: 27843 - RNA, 77 nt, synthetic construct
  source 1..77: mol_type = other RNA
accaccttctccgacaggtcctgccatttcaccaggaacatgtaaacctgggggaaagccagagtcgggggacccca

SEQ ID NO: 27844 - RNA, 78 nt, synthetic construct
  source 1..78: mol_type = other RNA
gaccaccttctccgacaggtcctgccatttcaccaggaacatgtagacctgggggaaagccagagtcgggggacccca

SEQ ID NO: 27845 - RNA, 78 nt, synthetic construct
  source 1..78: mol_type = other RNA
gaccaccttctccgacaggtcctgccatttcaccaggaacatgtacacctgggggaaagccagagtcgggggacccca

SEQ ID NO: 27846 - RNA, 78 nt, synthetic construct
  source 1..78: mol_type = other RNA
gaccaccttctccgacaggtcctgccatttcaccaggaacatgtaaacctgggggaaagccagagtcgggggacccca

SEQ ID NO: 27847 - RNA, 78 nt, synthetic construct
  source 1..78: mol_type = other RNA
gaccaccttctccgacaggtcctgccatttcaccaggaacatgtatacctgggggaaagccagagtcgggggacccca

SEQ ID NO: 27848 - RNA, 79 nt, synthetic construct
  source 1..79: mol_type = other RNA
agaccaccttctccgacaggtcctgccatttcaccaggaacatgtacacctgggggaaagccagagtcgggggacccca

SEQ ID NO: 27849 - RNA, 79 nt, synthetic construct
  source 1..79: mol_type = other RNA
agaccaccttctccgacaggtcctgccatttcaccaggaacatgtagacctgggggaaagccagagtcgggggacccca

SEQ ID NO: 27850 - RNA, 79 nt, synthetic construct
  source 1..79: mol_type = other RNA
agaccaccttctccgacaggtcctgccatttcaccaggaacatgtatacctgggggaaagccagagtcgggggacccca

SEQ ID NO: 27851 - RNA, 79 nt, synthetic construct
  source 1..79: mol_type = other RNA
agaccaccttctccgacaggtcctgccatttcaccaggaacatgtaaacctgggggaaagccagagtcgggggacccca

SEQ ID NO: 27852 - RNA, 80 nt, synthetic construct
  source 1..80: mol_type = other RNA
tagaccaccttctccgacaggtcctgccatttcaccaggaacatgtacacctgggggaaagccagagtcgggggacccca

SEQ ID NO: 27853 - RNA, 80 nt, synthetic construct
  source 1..80: mol_type = other RNA
tagaccaccttctccgacaggtcctgccatttcaccaggaacatgtaaacctgggggaaagccagagtcgggggacccca

SEQ ID NO: 27854 - RNA, 80 nt, synthetic construct
  source 1..80: mol_type = other RNA
tagaccaccttctccgacaggtcctgccatttcaccaggaacatgtatacctgggggaaagccagagtcgggggacccca

SEQ ID NO: 27855 - RNA, 80 nt, synthetic construct
  source 1..80: mol_type = other RNA
tagaccaccttctccgacaggtcctgccatttcaccaggaacatgtagacctgggggaaagccagagtcgggggacccca

SEQ ID NO: 27856 - RNA, 81 nt, synthetic construct
  source 1..81: mol_type = other RNA
gtagaccaccttctccgacaggtcctgccatttcaccaggaacatgtatacctgggggaaagccagagtcgggggacccca

SEQ ID NO: 27857 - RNA, 81 nt, synthetic construct
  source 1..81: mol_type = other RNA
gtagaccaccttctccgacaggtcctgccatttcaccaggaacatgtagacctgggggaaagccagagtcgggggacccca

SEQ ID NO: 27858 - RNA, 81 nt, synthetic construct
  source 1..81: mol_type = other RNA
gtagaccaccttctccgacaggtcctgccatttcaccaggaacatgtaaacctgggggaaagccagagtcgggggacccca

SEQ ID NO: 27859 - RNA, 81 nt, synthetic construct
  source 1..81: mol_type = other RNA
gtagaccaccttctccgacaggtcctgccatttcaccaggaacatgtacacctgggggaaagccagagtcgggggacccca

SEQ ID NO: 27860 - RNA, 82 nt, synthetic construct
  source 1..82: mol_type = other RNA
ggtagaccaccttctccgacaggtcctgccatttcaccaggaacatgtacacctgggggaaagccagagtcgggggacccca

SEQ ID NO: 27861 - RNA, 82 nt, synthetic construct
  source 1..82: mol_type = other RNA
ggtagaccaccttctccgacaggtcctgccatttcaccaggaacatgtatacctgggggaaagccagagtcgggggacccca

SEQ ID NO: 27862 - RNA, 82 nt, synthetic construct
  source 1..82: mol_type = other RNA
ggtagaccaccttctccgacaggtcctgccatttcaccaggaacatgtaaacctgggggaaagccagagtcgggggacccca

SEQ ID NO: 27863 - RNA, 82 nt, synthetic construct
  source 1..82: mol_type = other RNA
ggtagaccaccttctccgacaggtcctgccatttcaccaggaacatgtagacctgggggaaagccagagtcgggggacccca

SEQ ID NO: 27864 - RNA, 83 nt, synthetic construct
  source 1..83: mol_type = other RNA
cggtagaccaccttctccgacaggtcctgccatttcaccaggaacatgtacacctgggggaaagccagagtcgggggacccca

SEQ ID NO: 27865 - RNA, 83 nt, synthetic construct
  source 1..83: mol_type = other RNA
cggtagaccaccttctccgacaggtcctgccatttcaccaggaacatgtatacctgggggaaagccagagtcgggggacccca

SEQ ID NO: 27866 - RNA, 83 nt, synthetic construct
  source 1..83: mol_type = other RNA
cggtagaccaccttctccgacaggtcctgccatttcaccaggaacatgtagacctgggggaaagccagagtcgggggacccca

SEQ ID NO: 27867 - RNA, 83 nt, synthetic construct
  source 1..83: mol_type = other RNA
cggtagaccaccttctccgacaggtcctgccatttcaccaggaacatgtaaacctgggggaaagccagagtcgggggacccca

SEQ ID NO: 27868 - RNA, 84 nt, synthetic construct
  source 1..84: mol_type = other RNA
ccggtagaccaccttctccgacaggtcctgccatttcaccaggaacatgtatacctgggggaaagccagagtcgggggacccca

SEQ ID NO: 27869 - RNA, 84 nt, synthetic construct
  source 1..84: mol_type = other RNA
ccggtagaccaccttctccgacaggtcctgccatttcaccaggaacatgtagacctgggggaaagccagagtcgggggacccca

SEQ ID NO: 27870 - RNA, 84 nt, synthetic construct
  source 1..84: mol_type = other RNA
ccggtagaccaccttctccgacaggtcctgccatttcaccaggaacatgtacacctgggggaaagccagagtcgggggacccca

SEQ ID NO: 27871 - RNA, 84 nt, synthetic construct
  source 1..84: mol_type = other RNA
ccggtagaccaccttctccgacaggtcctgccatttcaccaggaacatgtaaacctgggggaaagccagagtcgggggacccca

SEQ ID NO: 27872 - RNA, 85 nt, synthetic construct
  source 1..85: mol_type = other RNA
gccggtagaccaccttctccgacaggtcctgccatttcaccaggaacatgtacacctgggggaaagccagagtcgggggacccca

SEQ ID NO: 27873 - RNA, 85 nt, synthetic construct
  source 1..85: mol_type = other RNA
gccggtagaccaccttctccgacaggtcctgccatttcaccaggaacatgtaaacctgggggaaagccagagtcgggggacccca

SEQ ID NO: 27874 - RNA, 85 nt, synthetic construct
  source 1..85: mol_type = other RNA
gccggtagaccaccttctccgacaggtcctgccatttcaccaggaacatgtagacctgggggaaagccagagtcgggggacccca

SEQ ID NO: 27875 - RNA, 85 nt, synthetic construct
  source 1..85: mol_type = other RNA
gccggtagaccaccttctccgacaggtcctgccatttcaccaggaacatgtatacctgggggaaagccagagtcgggggacccca

SEQ ID NO: 27876 - RNA, 86 nt, synthetic construct
  source 1..86: mol_type = other RNA
cgccggtagaccaccttctccgacaggtcctgccatttcaccaggaacatgtagacctgggggaaagccagagtcgggggacccca

SEQ ID NO: 27877 - RNA, 86 nt, synthetic construct
  source 1..86: mol_type = other RNA
cgccggtagaccaccttctccgacaggtcctgccatttcaccaggaacatgtacacctgggggaaagccagagtcgggggacccca

SEQ ID NO: 27878 - RNA, 86 nt, synthetic construct
  source 1..86: mol_type = other RNA
cgccggtagaccaccttctccgacaggtcctgccatttcaccaggaacatgtaaacctgggggaaagccagagtcgggggacccca

SEQ ID NO: 27879 - RNA, 86 nt, synthetic construct
  source 1..86: mol_type = other RNA
cgccggtagaccaccttctccgacaggtcctgccatttcaccaggaacatgtatacctgggggaaagccagagtcgggggacccca

SEQ ID NO: 27880 - RNA, 87 nt, synthetic construct
  source 1..87: mol_type = other RNA
gcgccggtagaccaccttctccgacaggtcctgccatttcaccaggaacatgtagacctgggggaaagccagagtcgggggacccca

SEQ ID NO: 27881 - RNA, 87 nt, synthetic construct
  source 1..87: mol_type = other RNA
gcgccggtagaccaccttctccgacaggtcctgccatttcaccaggaacatgtatacctgggggaaagccagagtcgggggacccca

SEQ ID NO: 27882 - RNA, 87 nt, synthetic construct
  source 1..87: mol_type = other RNA
gcgccggtagaccaccttctccgacaggtcctgccatttcaccaggaacatgtacacctgggggaaagccagagtcgggggacccca

SEQ ID NO: 27883 - RNA, 87 nt, synthetic construct
  source 1..87: mol_type = other RNA
gcgccggtagaccaccttctccgacaggtcctgccatttcaccaggaacatgtaaacctgggggaaagccagagtcgggggacccca

SEQ ID NO: 27884 - RNA, 88 nt, synthetic construct
  source 1..88: mol_type = other RNA
agcgccggtagaccaccttctccgacaggtcctgccatttcaccaggaacatgtacacctgggggaaagccagagtcgggggacccca

SEQ ID NO: 27885 - RNA, 88 nt, synthetic construct
  source 1..88: mol_type = other RNA
agcgccggtagaccaccttctccgacaggtcctgccatttcaccaggaacatgtaaacctgggggaaagccagagtcgggggacccca

SEQ ID NO: 27886 - RNA, 88 nt, synthetic construct
  source 1..88: mol_type = other RNA
agcgccggtagaccaccttctccgacaggtcctgccatttcaccaggaacatgtatacctgggggaaagccagagtcgggggacccca

SEQ ID NO: 27887 - RNA, 88 nt, synthetic construct
  source 1..88: mol_type = other RNA
agcgccggtagaccaccttctccgacaggtcctgccatttcaccaggaacatgtagacctgggggaaagccagagtcgggggacccca

SEQ ID NO: 27888 - RNA, 89 nt, synthetic construct
  source 1..89: mol_type = other RNA
aagcgccggtagaccaccttctccgacaggtcctgccatttcaccaggaacatgtagacctgggggaaagccagagtcgggggacccca

SEQ ID NO: 27889 - RNA, 89 nt, synthetic construct
  source 1..89: mol_type = other RNA
aagcgccggtagaccaccttctccgacaggtcctgccatttcaccaggaacatgtatacctgggggaaagccagagtcgggggacccca

SEQ ID NO: 27890 - RNA, 89 nt, synthetic construct
  source 1..89: mol_type = other RNA
aagcgccggtagaccaccttctccgacaggtcctgccatttcaccaggaacatgtacacctgggggaaagccagagtcgggggacccca

SEQ ID NO: 27891 - RNA, 89 nt, synthetic construct
  source 1..89: mol_type = other RNA
aagcgccggtagaccaccttctccgacaggtcctgccatttcaccaggaacatgtaaacctgggggaaagccagagtcgggggacccca

SEQ ID NO: 27892 - RNA, 90 nt, synthetic construct
  source 1..90: mol_type = other RNA
gaagcgccggtagaccaccttctccgacaggtcctgccatttcaccaggaacatgtatacctgggggaaagccagagtcgggggacccca

SEQ ID NO: 27893 - RNA, 90 nt, synthetic construct
  source 1..90: mol_type = other RNA
gaagcgccggtagaccaccttctccgacaggtcctgccatttcaccaggaacatgtagacctgggggaaagccagagtcgggggacccca

SEQ ID NO: 27894 - RNA, 90 nt, synthetic construct
  source 1..90: mol_type = other RNA
gaagcgccggtagaccaccttctccgacaggtcctgccatttcaccaggaacatgtaaacctgggggaaagccagagtcgggggacccca

SEQ ID NO: 27895 - RNA, 90 nt, synthetic construct
  source 1..90: mol_type = other RNA
gaagcgccggtagaccaccttctccgacaggtcctgccatttcaccaggaacatgtacacctgggggaaagccagagtcgggggacccca

SEQ ID NO: 27896 - RNA, 91 nt, synthetic construct
  source 1..91: mol_type = other RNA
tgaagcgccggtagaccaccttctccgacaggtcctgccatttcaccaggaacatgtaaacctgggggaaagccagagtcgggggacccca

SEQ ID NO: 27897 - RNA, 91 nt, synthetic construct
  source 1..91: mol_type = other RNA
tgaagcgccggtagaccaccttctccgacaggtcctgccatttcaccaggaacatgtatacctgggggaaagccagagtcgggggacccca

SEQ ID NO: 27898 - RNA, 91 nt, synthetic construct
  source 1..91: mol_type = other RNA
tgaagcgccggtagaccaccttctccgacaggtcctgccatttcaccaggaacatgtagacctgggggaaagccagagtcgggggacccca

SEQ ID NO: 27899 - RNA, 91 nt, synthetic construct
  source 1..91: mol_type = other RNA
tgaagcgccggtagaccaccttctccgacaggtcctgccatttcaccaggaacatgtacacctgggggaaagccagagtcgggggacccca

SEQ ID NO: 27900 - RNA, 92 nt, synthetic construct
  source 1..92: mol_type = other RNA
gtgaagcgccggtagaccaccttctccgacaggtcctgccatttcaccaggaacatgtatacctgggggaaagccagagtcgggggacccca

SEQ ID NO: 27901 - RNA, 92 nt, synthetic construct
  source 1..92: mol_type = other RNA
gtgaagcgccggtagaccaccttctccgacaggtcctgccatttcaccaggaacatgtagacctgggggaaagccagagtcgggggacccca

SEQ ID NO: 27902 - RNA, 92 nt, synthetic construct
  source 1..92: mol_type = other RNA
gtgaagcgccggtagaccaccttctccgacaggtcctgccatttcaccaggaacatgtacacctgggggaaagccagagtcgggggacccca

SEQ ID NO: 27903 - RNA, 92 nt, synthetic construct
  source 1..92: mol_type = other RNA
gtgaagcgccggtagaccaccttctccgacaggtcctgccatttcaccaggaacatgtaaacctgggggaaagccagagtcgggggacccca

SEQ ID NO: 27904 - RNA, 93 nt, synthetic construct
  source 1..93: mol_type = other RNA
ggtgaagcgccggtagaccaccttctccgacaggtcctgccatttcaccaggaacatgtaaacctgggggaaagccagagtcgggggacccca

SEQ ID NO: 27905 - RNA, 93 nt, synthetic construct
  source 1..93: mol_type = other RNA
ggtgaagcgccggtagaccaccttctccgacaggtcctgccatttcaccaggaacatgtagacctgggggaaagccagagtcgggggacccca

SEQ ID NO: 27906 - RNA, 93 nt, synthetic construct
  source 1..93: mol_type = other RNA
ggtgaagcgccggtagaccaccttctccgacaggtcctgccatttcaccaggaacatgtatacctgggggaaagccagagtcgggggacccca

SEQ ID NO: 27907 - RNA, 93 nt, synthetic construct
  source 1..93: mol_type = other RNA
ggtgaagcgccggtagaccaccttctccgacaggtcctgccatttcaccaggaacatgtacacctgggggaaagccagagtcgggggacccca

SEQ ID NO: 27908 - RNA, 94 nt, synthetic construct
  source 1..94: mol_type = other RNA
cggtgaagcgccggtagaccaccttctccgacaggtcctgccatttcaccaggaacatgtaaacctgggggaaagccagagtcgggggacccca

SEQ ID NO: 27909 - RNA, 94 nt, synthetic construct
  source 1..94: mol_type = other RNA
cggtgaagcgccggtagaccaccttctccgacaggtcctgccatttcaccaggaacatgtagacctgggggaaagccagagtcgggggacccca

SEQ ID NO: 27910 - RNA, 94 nt, synthetic construct
  source 1..94: mol_type = other RNA
cggtgaagcgccggtagaccaccttctccgacaggtcctgccatttcaccaggaacatgtacacctgggggaaagccagagtcgggggacccca

SEQ ID NO: 27911 - RNA, 94 nt, synthetic construct
  source 1..94: mol_type = other RNA
cggtgaagcgccggtagaccaccttctccgacaggtcctgccatttcaccaggaacatgtatacctgggggaaagccagagtcgggggacccca

SEQ ID NO: 27912 - RNA, 95 nt, synthetic construct
  source 1..95: mol_type = other RNA
tcggtgaagcgccggtagaccaccttctccgacaggtcctgccatttcaccaggaacatgtaaacctgggggaaagccagagtcgggggacccca

SEQ ID NO: 27913 - RNA, 95 nt, synthetic construct
  source 1..95: mol_type = other RNA
tcggtgaagcgccggtagaccaccttctccgacaggtcctgccatttcaccaggaacatgtatacctgggggaaagccagagtcgggggacccca

SEQ ID NO: 27914 - RNA, 95 nt, synthetic construct
  source 1..95: mol_type = other RNA
tcggtgaagcgccggtagaccaccttctccgacaggtcctgccatttcaccaggaacatgtagacctgggggaaagccagagtcgggggacccca

SEQ ID NO: 27915 - RNA, 95 nt, synthetic construct
  source 1..95: mol_type = other RNA
tcggtgaagcgccggtagaccaccttctccgacaggtcctgccatttcaccaggaacatgtacacctgggggaaagccagagtcgggggacccca

SEQ ID NO: 27916 - RNA, 96 nt, synthetic construct
  source 1..96: mol_type = other RNA
ctcggtgaagcgccggtagaccaccttctccgacaggtcctgccatttcaccaggaacatgtaaacctgggggaaagccagagtcgggggacccca

SEQ ID NO: 27917 - RNA, 96 nt, synthetic construct
  source 1..96: mol_type = other RNA
ctcggtgaagcgccggtagaccaccttctccgacaggtcctgccatttcaccaggaacatgtacacctgggggaaagccagagtcgggggacccca

SEQ ID NO: 27918 - RNA, 96 nt, synthetic construct
  source 1..96: mol_type = other RNA
ctcggtgaagcgccggtagaccaccttctccgacaggtcctgccatttcaccaggaacatgtagacctgggggaaagccagagtcgggggacccca

SEQ ID NO: 27919 - RNA, 96 nt, synthetic construct
  source 1..96: mol_type = other RNA
ctcggtgaagcgccggtagaccaccttctccgacaggtcctgccatttcaccaggaacatgtatacctgggggaaagccagagtcgggggacccca

SEQ ID NO: 27920 - RNA, 97 nt, synthetic construct
  source 1..97: mol_type = other RNA
tctcggtgaagcgccggtagaccaccttctccgacaggtcctgccatttcaccaggaacatgtacacctgggggaaagccagagtcgggggacccca

SEQ ID NO: 27921 - RNA, 97 nt, synthetic construct
  source 1..97: mol_type = other RNA
tctcggtgaagcgccggtagaccaccttctccgacaggtcctgccatttcaccaggaacatgtaaacctgggggaaagccagagtcgggggacccca

SEQ ID NO: 27922 - RNA, 97 nt, synthetic construct
  source 1..97: mol_type = other RNA
tctcggtgaagcgccggtagaccaccttctccgacaggtcctgccatttcaccaggaacatgtatacctgggggaaagccagagtcgggggacccca

SEQ ID NO: 27923 - RNA, 97 nt, synthetic construct
  source 1..97: mol_type = other RNA
tctcggtgaagcgccggtagaccaccttctccgacaggtcctgccatttcaccaggaacatgtagacctgggggaaagccagagtcgggggacccca

SEQ ID NO: 27924 - RNA, 98 nt, synthetic construct
  source 1..98: mol_type = other RNA
atctcggtgaagcgccggtagaccaccttctccgacaggtcctgccatttcaccaggaacatgtatacctgggggaaagccagagtcgggggacccca

SEQ ID NO: 27925 - RNA, 98 nt, synthetic construct
  source 1..98: mol_type = other RNA
atctcggtgaagcgccggtagaccaccttctccgacaggtcctgccatttcaccaggaacatgtaaacctgggggaaagccagagtcgggggacccca

SEQ ID NO: 27926 - RNA, 98 nt, synthetic construct
  source 1..98: mol_type = other RNA
atctcggtgaagcgccggtagaccaccttctccgacaggtcctgccatttcaccaggaacatgtagacctgggggaaagccagagtcgggggacccca

SEQ ID NO: 27927 - RNA, 98 nt, synthetic construct
  source 1..98: mol_type = other RNA
atctcggtgaagcgccggtagaccaccttctccgacaggtcctgccatttcaccaggaacatgtacacctgggggaaagccagagtcgggggacccca

SEQ ID NO: 27928 - RNA, 99 nt, synthetic construct
  source 1..99: mol_type = other RNA
gatctcggtgaagcgccggtagaccaccttctccgacaggtcctgccatttcaccaggaacatgtatacctgggggaaagccagagtcgggggacccca

SEQ ID NO: 27929 - RNA, 99 nt, synthetic construct
  source 1..99: mol_type = other RNA
gatctcggtgaagcgccggtagaccaccttctccgacaggtcctgccatttcaccaggaacatgtagacctgggggaaagccagagtcgggggacccca

SEQ ID NO: 27930 - RNA, 99 nt, synthetic construct
  source 1..99: mol_type = other RNA
gatctcggtgaagcgccggtagaccaccttctccgacaggtcctgccatttcaccaggaacatgtacacctgggggaaagccagagtcgggggacccca

SEQ ID NO: 27931 - RNA, 99 nt, synthetic construct
  source 1..99: mol_type = other RNA
gatctcggtgaagcgccggtagaccaccttctccgacaggtcctgccatttcaccaggaacatgtaaacctgggggaaagccagagtcgggggacccca

SEQ ID NO: 27932 - RNA, 100 nt, synthetic construct
  source 1..100: mol_type = other RNA
agatctcggtgaagcgccggtagaccaccttctccgacaggtcctgccatttcaccaggaacatgtatacctgggggaaagccagagtcgggggacccca

SEQ ID NO: 27933 - RNA, 100 nt, synthetic construct
  source 1..100: mol_type = other RNA
agatctcggtgaagcgccggtagaccaccttctccgacaggtcctgccatttcaccaggaacatgtacacctgggggaaagccagagtcgggggacccca

SEQ ID NO: 27934 - RNA, 100 nt, synthetic construct
  source 1..100: mol_type = other RNA
agatctcggtgaagcgccggtagaccaccttctccgacaggtcctgccatttcaccaggaacatgtaaacctgggggaaagccagagtcgggggacccca

SEQ ID NO: 27935 - RNA, 100 nt, synthetic construct
  source 1..100: mol_type = other RNA
agatctcggtgaagcgccggtagaccaccttctccgacaggtcctgccatttcaccaggaacatgtagacctgggggaaagccagagtcgggggacccca

SEQ ID NO: 27936 - RNA, 101 nt, synthetic construct
  source 1..101: mol_type = other RNA
tagatctcggtgaagcgccggtagaccaccttctccgacaggtcctgccatttcaccaggaacatgtatacctgggggaaagccagagtcgggggacccca

SEQ ID NO: 27937 - RNA, 101 nt, synthetic construct
  source 1..101: mol_type = other RNA
tagatctcggtgaagcgccggtagaccaccttctccgacaggtcctgccatttcaccaggaacatgtagacctgggggaaagccagagtcgggggacccca

SEQ ID NO: 27938 - RNA, 101 nt, synthetic construct
  source 1..101: mol_type = other RNA
tagatctcggtgaagcgccggtagaccaccttctccgacaggtcctgccatttcaccaggaacatgtacacctgggggaaagccagagtcgggggacccca

SEQ ID NO: 27939 - RNA, 101 nt, synthetic construct
  source 1..101: mol_type = other RNA
tagatctcggtgaagcgccggtagaccaccttctccgacaggtcctgccatttcaccaggaacatgtaaacctgggggaaagccagagtcgggggacccca

SEQ ID NO: 27940 - RNA, 102 nt, synthetic construct
  source 1..102: mol_type = other RNA
gtagatctcggtgaagcgccggtagaccaccttctccgacaggtcctgccatttcaccaggaacatgtatacctgggggaaagccagagtcgggggacccca

SEQ ID NO: 27941 - RNA, 102 nt, synthetic construct
  source 1..102: mol_type = other RNA
gtagatctcggtgaagcgccggtagaccaccttctccgacaggtcctgccatttcaccaggaacatgtagacctgggggaaagccagagtcgggggacccca

SEQ ID NO: 27942 - RNA, 102 nt, synthetic construct
  source 1..102: mol_type = other RNA
gtagatctcggtgaagcgccggtagaccaccttctccgacaggtcctgccatttcaccaggaacatgtacacctgggggaaagccagagtcgggggacccca

SEQ ID NO: 27943 - RNA, 102 nt, synthetic construct
  source 1..102: mol_type = other RNA
gtagatctcggtgaagcgccggtagaccaccttctccgacaggtcctgccatttcaccaggaacatgtaaacctgggggaaagccagagtcgggggacccca

SEQ ID NO: 27944 - RNA, 103 nt, synthetic construct
  source 1..103: mol_type = other RNA
cgtagatctcggtgaagcgccggtagaccaccttctccgacaggtcctgccatttcaccaggaacatgtacacctgggggaaagccagagtcgggggacccca

SEQ ID NO: 27945 - RNA, 103 nt, synthetic construct
  source 1..103: mol_type = other RNA
cgtagatctcggtgaagcgccggtagaccaccttctccgacaggtcctgccatttcaccaggaacatgtagacctgggggaaagccagagtcgggggacccca

SEQ ID NO: 27946 - RNA, 103 nt, synthetic construct
  source 1..103: mol_type = other RNA
cgtagatctcggtgaagcgccggtagaccaccttctccgacaggtcctgccatttcaccaggaacatgtatacctgggggaaagccagagtcgggggacccca

SEQ ID NO: 27947 - RNA, 103 nt, synthetic construct
  source 1..103: mol_type = other RNA
cgtagatctcggtgaagcgccggtagaccaccttctccgacaggtcctgccatttcaccaggaacatgtaaacctgggggaaagccagagtcgggggacccca

SEQ ID NO: 27948 - RNA, 16 nt, synthetic construct
  source 1..16: mol_type = other RNA
tcaccccaatcctctg

SEQ ID NO: 27949 - RNA, 17 nt, synthetic construct
  source 1..17: mol_type = other RNA
ctcaccccaatcctctg

SEQ ID NO: 27950 - RNA, 18 nt, synthetic construct
  source 1..18: mol_type = other RNA
cctcaccccaatcctctg

SEQ ID NO: 27951 - RNA, 19 nt, synthetic construct
  source 1..19: mol_type = other RNA
tcctcaccccaatcctctg

SEQ ID NO: 27952 - RNA, 20 nt, synthetic construct
  source 1..20: mol_type = other RNA
gtcctcaccccaatcctctg

SEQ ID NO: 27953 - RNA, 21 nt, synthetic construct
  source 1..21: mol_type = other RNA
ggtcctcaccccaatcctctg

SEQ ID NO: 27954 - RNA, 22 nt, synthetic construct
  source 1..22: mol_type = other RNA
tggtcctcaccccaatcctctg

SEQ ID NO: 27955-27958 - skipped (4 entries)

SEQ ID NO: 27959 - RNA, 10 nt, synthetic construct
  source 1..10: mol_type = other RNA
aggattgggg

SEQ ID NO: 27960 - RNA, 11 nt, synthetic construct
  source 1..11: mol_type = other RNA
aggattggggt

SEQ ID NO: 27961 - RNA, 12 nt, synthetic construct
  source 1..12: mol_type = other RNA
aggattggggtg

SEQ ID NO: 27962 - RNA, 13 nt, synthetic construct
  source 1..13: mol_type = other RNA
aggattggggtga

SEQ ID NO: 27963 - RNA, 14 nt, synthetic construct
  source 1..14: mol_type = other RNA
aggattggggtgag

SEQ ID NO: 27964 - RNA, 15 nt, synthetic construct
  source 1..15: mol_type = other RNA
aggattggggtgagg

SEQ ID NO: 27965 - RNA, 16 nt, synthetic construct
  source 1..16: mol_type = other RNA
aggattggggtgagga

SEQ ID NO: 27966 - RNA, 17 nt, synthetic construct
  source 1..17: mol_type = other RNA
aggattggggtgaggac

SEQ ID NO: 27967 - RNA, 18 nt, synthetic construct
  source 1..18: mol_type = other RNA
aggattggggtgaggacc

SEQ ID NO: 27968 - RNA, 19 nt, synthetic construct
  source 1..19: mol_type = other RNA
aggattggggtgaggacca

SEQ ID NO: 27969 - RNA, 97 nt, synthetic construct
  source 1..97: mol_type = other RNA
acctgggggaaagccagagtcgggggaccccattcagcctccaaagaggctttgctgtgtgcacccaggatcccactacccactggaggaagcccag

SEQ ID NO: 27970 - RNA, 98 nt, synthetic construct
  source 1..98: mol_type = other RNA
tacctgggggaaagccagagtcgggggaccccattcagcctccaaagaggctttgctgtgtgcacccaggatcccactacccactggaggaagcccag

SEQ ID NO: 27971 - RNA, 98 nt, synthetic construct
  source 1..98: mol_type = other RNA
cacctgggggaaagccagagtcgggggaccccattcagcctccaaagaggctttgctgtgtgcacccaggatcccactacccactggaggaagcccag

SEQ ID NO: 27972 - RNA, 98 nt, synthetic construct
  source 1..98: mol_type = other RNA
aacctgggggaaagccagagtcgggggaccccattcagcctccaaagaggctttgctgtgtgcacccaggatcccactacccactggaggaagcccag

SEQ ID NO: 27973 - RNA, 98 nt, synthetic construct
  source 1..98: mol_type = other RNA
gacctgggggaaagccagagtcgggggaccccattcagcctccaaagaggctttgctgtgtgcacccaggatcccactacccactggaggaagcccag

SEQ ID NO: 27974 - RNA, 99 nt, synthetic construct
  source 1..99: mol_type = other RNA
atacctgggggaaagccagagtcgggggaccccattcagcctccaaagaggctttgctgtgtgcacccaggatcccactacccactggaggaagcccag

SEQ ID NO: 27975 - RNA, 99 nt, synthetic construct
  source 1..99: mol_type = other RNA
agacctgggggaaagccagagtcgggggaccccattcagcctccaaagaggctttgctgtgtgcacccaggatcccactacccactggaggaagcccag

SEQ ID NO: 27976 - RNA, 99 nt, synthetic construct
  source 1..99: mol_type = other RNA
aaacctgggggaaagccagagtcgggggaccccattcagcctccaaagaggctttgctgtgtgcacccaggatcccactacccactggaggaagcccag

SEQ ID NO: 27977 - RNA, 99 nt, synthetic construct
  source 1..99: mol_type = other RNA
acacctgggggaaagccagagtcgggggaccccattcagcctccaaagaggctttgctgtgtgcacccaggatcccactacccactggaggaagcccag

SEQ ID NO: 27978 - RNA, 100 nt, synthetic construct
  source 1..100: mol_type = other RNA
tacacctgggggaaagccagagtcgggggaccccattcagcctccaaagaggctttgctgtgtgcacccaggatcccactacccactggaggaagcccag

SEQ ID NO: 27979 - RNA, 100 nt, synthetic construct
  source 1..100: mol_type = other RNA
tatacctgggggaaagccagagtcgggggaccccattcagcctccaaagaggctttgctgtgtgcacccaggatcccactacccactggaggaagcccag

SEQ ID NO: 27980 - RNA, 100 nt, synthetic construct
  source 1..100: mol_type = other RNA
tagacctgggggaaagccagagtcgggggaccccattcagcctccaaagaggctttgctgtgtgcacccaggatcccactacccactggaggaagcccag

SEQ ID NO: 27981 - RNA, 100 nt, synthetic construct
  source 1..100: mol_type = other RNA
taaacctgggggaaagccagagtcgggggaccccattcagcctccaaagaggctttgctgtgtgcacccaggatcccactacccactggaggaagcccag

SEQ ID NO: 27982 - RNA, 101 nt, synthetic construct
  source 1..101: mol_type = other RNA
gtaaacctgggggaaagccagagtcgggggaccccattcagcctccaaagaggctttgctgtgtgcacccaggatcccactacccactggaggaagcccag

SEQ ID NO: 27983 - RNA, 101 nt, synthetic construct
  source 1..101: mol_type = other RNA
gtacacctgggggaaagccagagtcgggggaccccattcagcctccaaagaggctttgctgtgtgcacccaggatcccactacccactggaggaagcccag

SEQ ID NO: 27984 - RNA, 101 nt, synthetic construct
  source 1..101: mol_type = other RNA
gtagacctgggggaaagccagagtcgggggaccccattcagcctccaaagaggctttgctgtgtgcacccaggatcccactacccactggaggaagcccag

SEQ ID NO: 27985 - RNA, 101 nt, synthetic construct
  source 1..101: mol_type = other RNA
gtatacctgggggaaagccagagtcgggggaccccattcagcctccaaagaggctttgctgtgtgcacccaggatcccactacccactggaggaagcccag

SEQ ID NO: 27986 - RNA, 102 nt, synthetic construct
  source 1..102: mol_type = other RNA
tgtatacctgggggaaagccagagtcgggggaccccattcagcctccaaagaggctttgctgtgtgcacccaggatcccactacccactggaggaagcccag

SEQ ID NO: 27987 - RNA, 102 nt, synthetic construct
  source 1..102: mol_type = other RNA
tgtaaacctgggggaaagccagagtcgggggaccccattcagcctccaaagaggctttgctgtgtgcacccaggatcccactacccactggaggaagcccag

SEQ ID NO: 27988 - RNA, 102 nt, synthetic construct
  source 1..102: mol_type = other RNA
tgtacacctgggggaaagccagagtcgggggaccccattcagcctccaaagaggctttgctgtgtgcacccaggatcccactacccactggaggaagcccag

SEQ ID NO: 27989 - RNA, 102 nt, synthetic construct
  source 1..102: mol_type = other RNA
tgtagacctgggggaaagccagagtcgggggaccccattcagcctccaaagaggctttgctgtgtgcacccaggatcccactacccactggaggaagcccag

SEQ ID NO: 27990 - RNA, 103 nt, synthetic construct
  source 1..103: mol_type = other RNA
atgtaaacctgggggaaagccagagtcgggggaccccattcagcctccaaagaggctttgctgtgtgcacccaggatcccactacccactggaggaagcccag

SEQ ID NO: 27991 - RNA, 103 nt, synthetic construct
  source 1..103: mol_type = other RNA
atgtagacctgggggaaagccagagtcgggggaccccattcagcctccaaagaggctttgctgtgtgcacccaggatcccactacccactggaggaagcccag

SEQ ID NO: 27992 - RNA, 103 nt, synthetic construct
  source 1..103: mol_type = other RNA
atgtatacctgggggaaagccagagtcgggggaccccattcagcctccaaagaggctttgctgtgtgcacccaggatcccactacccactggaggaagcccag

SEQ ID NO: 27993 - RNA, 103 nt, synthetic construct
  source 1..103: mol_type = other RNA
atgtacacctgggggaaagccagagtcgggggaccccattcagcctccaaagaggctttgctgtgtgcacccaggatcccactacccactggaggaagcccag

SEQ ID NO: 27994 - RNA, 16 nt, synthetic construct
  source 1..16: mol_type = other RNA
accaccttctccgaca

SEQ ID NO: 27995 - RNA, 17 nt, synthetic construct
  source 1..17: mol_type = other RNA
gaccaccttctccgaca

SEQ ID NO: 27996 - RNA, 18 nt, synthetic construct
  source 1..18: mol_type = other RNA
agaccaccttctccgaca

SEQ ID NO: 27997 - RNA, 19 nt, synthetic construct
  source 1..19: mol_type = other RNA
tagaccaccttctccgaca

SEQ ID NO: 27998 - RNA, 20 nt, synthetic construct
  source 1..20: mol_type = other RNA
gtagaccaccttctccgaca

SEQ ID NO: 27999 - RNA, 21 nt, synthetic construct
  source 1..21: mol_type = other RNA
ggtagaccaccttctccgaca

SEQ ID NO: 28000 - RNA, 22 nt, synthetic construct
  source 1..22: mol_type = other RNA
cggtagaccaccttctccgaca

SEQ ID NO: 28001-28006 - skipped (6 entries)

SEQ ID NO: 28007 - RNA, 10 nt, synthetic construct
  source 1..10: mol_type = other RNA
cggagaaggt

SEQ ID NO: 28008 - RNA, 11 nt, synthetic construct
  source 1..11: mol_type = other RNA
cggagaaggtg

SEQ ID NO: 28009 - RNA, 12 nt, synthetic construct
  source 1..12: mol_type = other RNA
cggagaaggtgg

SEQ ID NO: 28010 - RNA, 13 nt, synthetic construct
  source 1..13: mol_type = other RNA
cggagaaggtggt

SEQ ID NO: 28011 - RNA, 14 nt, synthetic construct
  source 1..14: mol_type = other RNA
cggagaaggtggtc

SEQ ID NO: 28012 - RNA, 15 nt, synthetic construct
  source 1..15: mol_type = other RNA
cggagaaggtggtct

SEQ ID NO: 28013 - RNA, 16 nt, synthetic construct
  source 1..16: mol_type = other RNA
cggagaaggtggtcta

SEQ ID NO: 28014 - RNA, 17 nt, synthetic construct
  source 1..17: mol_type = other RNA
cggagaaggtggtctac

SEQ ID NO: 28015 - RNA, 18 nt, synthetic construct
  source 1..18: mol_type = other RNA
cggagaaggtggtctacc

SEQ ID NO: 28016 - RNA, 19 nt, synthetic construct
  source 1..19: mol_type = other RNA
cggagaaggtggtctaccg

SEQ ID NO: 28017 - RNA, 34 nt, synthetic construct
  source 1..34: mol_type = other RNA
gtgtacatgttcctggtgaaatggcaggacctgt

SEQ ID NO: 28018 - RNA, 34 nt, synthetic construct
  source 1..34: mol_type = other RNA
gtatacatgttcctggtgaaatggcaggatctgt

SEQ ID NO: 28019 - RNA, 34 nt, synthetic construct
  source 1..34: mol_type = other RNA
gtctacatgttcctggtgaaatggcaggacctgt

SEQ ID NO: 28020 - RNA, 34 nt, synthetic construct
  source 1..34: mol_type = other RNA
gtctacatgttcctggtgaaatggcaggatctgt

SEQ ID NO: 28021 - RNA, 34 nt, synthetic construct
  source 1..34: mol_type = other RNA
gtatacatgttcctggtgaaatggcaggacctgt

SEQ ID NO: 28022 - RNA, 34 nt, synthetic construct
  source 1..34: mol_type = other RNA
gtgtacatgttcctggtgaaatggcaggatctgt

SEQ ID NO: 28023 - RNA, 34 nt, synthetic construct
  source 1..34: mol_type = other RNA
gtttacatgttcctggtgaaatggcaggacctgt

SEQ ID NO: 28024 - RNA, 34 nt, synthetic construct
  source 1..34: mol_type = other RNA
gtttacatgttcctggtgaaatggcaggatctgt

SEQ ID NO: 28025 - RNA, 35 nt, synthetic construct
  source 1..35: mol_type = other RNA
ggtatacatgttcctggtgaaatggcaggatctgt

SEQ ID NO: 28026 - RNA, 35 nt, synthetic construct
  source 1..35: mol_type = other RNA
ggtatacatgttcctggtgaaatggcaggacctgt

SEQ ID NO: 28027 - RNA, 35 nt, synthetic construct
  source 1..35: mol_type = other RNA
ggtctacatgttcctggtgaaatggcaggatctgt

SEQ ID NO: 28028 - RNA, 35 nt, synthetic construct
  source 1..35: mol_type = other RNA
ggtctacatgttcctggtgaaatggcaggacctgt

SEQ ID NO: 28029 - RNA, 35 nt, synthetic construct
  source 1..35: mol_type = other RNA
ggtttacatgttcctggtgaaatggcaggatctgt

SEQ ID NO: 28030 - RNA, 35 nt, synthetic construct
  source 1..35: mol_type = other RNA
ggtttacatgttcctggtgaaatggcaggacctgt

SEQ ID NO: 28031 - RNA, 35 nt, synthetic construct
  source 1..35: mol_type = other RNA
ggtgtacatgttcctggtgaaatggcaggacctgt

SEQ ID NO: 28032 - RNA, 35 nt, synthetic construct
  source 1..35: mol_type = other RNA
ggtgtacatgttcctggtgaaatggcaggatctgt

SEQ ID NO: 28033 - RNA, 36 nt, synthetic construct
  source 1..36: mol_type = other RNA
aggtgtacatgttcctggtgaaatggcaggacctgt

SEQ ID NO: 28034 - RNA, 36 nt, synthetic construct
  source 1..36: mol_type = other RNA
aggtatacatgttcctggtgaaatggcaggacctgt

SEQ ID NO: 28035 - RNA, 36 nt, synthetic construct
  source 1..36: mol_type = other RNA
aggtctacatgttcctggtgaaatggcaggatctgt

SEQ ID NO: 28036 - RNA, 36 nt, synthetic construct
  source 1..36: mol_type = other RNA
aggtctacatgttcctggtgaaatggcaggacctgt

SEQ ID NO: 28037 - RNA, 36 nt, synthetic construct
  source 1..36: mol_type = other RNA
aggtgtacatgttcctggtgaaatggcaggatctgt

SEQ ID NO: 28038 - RNA, 36 nt, synthetic construct
  source 1..36: mol_type = other RNA
aggtttacatgttcctggtgaaatggcaggacctgt

SEQ ID NO: 28039 - RNA, 36 nt, synthetic construct
  source 1..36: mol_type = other RNA
aggtttacatgttcctggtgaaatggcaggatctgt

SEQ ID NO: 28040 - RNA, 36 nt, synthetic construct
  source 1..36: mol_type = other RNA
aggtatacatgttcctggtgaaatggcaggatctgt

SEQ ID NO: 28041 - RNA, 37 nt, synthetic construct
  source 1..37: mol_type = other RNA
caggtttacatgttcctggtgaaatggcaggatctgt

SEQ ID NO: 28042 - RNA, 37 nt, synthetic construct
  source 1..37: mol_type = other RNA
caggtatacatgttcctggtgaaatggcaggacctgt

SEQ ID NO: 28043 - RNA, 37 nt, synthetic construct
  source 1..37: mol_type = other RNA
caggtctacatgttcctggtgaaatggcaggatctgt

SEQ ID NO: 28044 - RNA, 37 nt, synthetic construct
  source 1..37: mol_type = other RNA
caggtgtacatgttcctggtgaaatggcaggatctgt

SEQ ID NO: 28045 - RNA, 37 nt, synthetic construct
  source 1..37: mol_type = other RNA
caggtctacatgttcctggtgaaatggcaggacctgt

SEQ ID NO: 28046 - RNA, 37 nt, synthetic construct
  source 1..37: mol_type = other RNA
caggtgtacatgttcctggtgaaatggcaggacctgt

SEQ ID NO: 28047 - RNA, 37 nt, synthetic construct
  source 1..37: mol_type = other RNA
caggtatacatgttcctggtgaaatggcaggatctgt

SEQ ID NO: 28048 - RNA, 37 nt, synthetic construct
  source 1..37: mol_type = other RNA
caggtttacatgttcctggtgaaatggcaggacctgt

SEQ ID NO: 28049 - RNA, 38 nt, synthetic construct
  source 1..38: mol_type = other RNA
ccaggtatacatgttcctggtgaaatggcaggatctgt

SEQ ID NO: 28050 - RNA, 38 nt, synthetic construct
  source 1..38: mol_type = other RNA
ccaggtttacatgttcctggtgaaatggcaggatctgt

SEQ ID NO: 28051 - RNA, 38 nt, synthetic construct
  source 1..38: mol_type = other RNA
ccaggtttacatgttcctggtgaaatggcaggacctgt

SEQ ID NO: 28052 - RNA, 38 nt, synthetic construct
  source 1..38: mol_type = other RNA
ccaggtgtacatgttcctggtgaaatggcaggatctgt

SEQ ID NO: 28053 - RNA, 38 nt, synthetic construct
  source 1..38: mol_type = other RNA
ccaggtgtacatgttcctggtgaaatggcaggacctgt

SEQ ID NO: 28054 - RNA, 38 nt, synthetic construct
  source 1..38: mol_type = other RNA
ccaggtctacatgttcctggtgaaatggcaggatctgt

SEQ ID NO: 28055 - RNA, 38 nt, synthetic construct
  source 1..38: mol_type = other RNA
ccaggtctacatgttcctggtgaaatggcaggacctgt

SEQ ID NO: 28056 - RNA, 38 nt, synthetic construct
  source 1..38: mol_type = other RNA
ccaggtatacatgttcctggtgaaatggcaggacctgt

SEQ ID NO: 28057 - RNA, 39 nt, synthetic construct
  source 1..39: mol_type = other RNA
cccaggtatacatgttcctggtgaaatggcaggacctgt

SEQ ID NO: 28058 - RNA, 39 nt, synthetic construct
  source 1..39: mol_type = other RNA
cccaggtctacatgttcctggtgaaatggcaggacctgt

SEQ ID NO: 28059 - RNA, 39 nt, synthetic construct
  source 1..39: mol_type = other RNA
cccaggtatacatgttcctggtgaaatggcaggatctgt

SEQ ID NO: 28060 - RNA, 39 nt, synthetic construct
  source 1..39: mol_type = other RNA
cccaggtgtacatgttcctggtgaaatggcaggatctgt

SEQ ID NO: 28061 - RNA, 39 nt, synthetic construct
  source 1..39: mol_type = other RNA
cccaggtttacatgttcctggtgaaatggcaggacctgt

SEQ ID NO: 28062 - RNA, 39 nt, synthetic construct
  source 1..39: mol_type = other RNA
cccaggtttacatgttcctggtgaaatggcaggatctgt

SEQ ID NO: 28063 - RNA, 39 nt, synthetic construct
  source 1..39: mol_type = other RNA
cccaggtgtacatgttcctggtgaaatggcaggacctgt

SEQ ID NO: 28064 - RNA, 39 nt, synthetic construct
  source 1..39: mol_type = other RNA
cccaggtctacatgttcctggtgaaatggcaggatctgt

SEQ ID NO: 28065 - RNA, 40 nt, synthetic construct
  source 1..40: mol_type = other RNA
ccccaggtgtacatgttcctggtgaaatggcaggacctgt

SEQ ID NO: 28066 - RNA, 40 nt, synthetic construct
  source 1..40: mol_type = other RNA
ccccaggtttacatgttcctggtgaaatggcaggatctgt

SEQ ID NO: 28067 - RNA, 40 nt, synthetic construct
  source 1..40: mol_type = other RNA
ccccaggtctacatgttcctggtgaaatggcaggatctgt

SEQ ID NO: 28068 - RNA, 40 nt, synthetic construct
  source 1..40: mol_type = other RNA
ccccaggtttacatgttcctggtgaaatggcaggacctgt

SEQ ID NO: 28069 - RNA, 40 nt, synthetic construct
  source 1..40: mol_type = other RNA
ccccaggtatacatgttcctggtgaaatggcaggacctgt

SEQ ID NO: 28070 - RNA, 40 nt, synthetic construct
  source 1..40: mol_type = other RNA
ccccaggtctacatgttcctggtgaaatggcaggacctgt

SEQ ID NO: 28071 - RNA, 40 nt, synthetic construct
  source 1..40: mol_type = other RNA
ccccaggtgtacatgttcctggtgaaatggcaggatctgt

SEQ ID NO: 28072 - RNA, 40 nt, synthetic construct
  source 1..40: mol_type = other RNA
ccccaggtatacatgttcctggtgaaatggcaggatctgt

SEQ ID NO: 28073 - RNA, 41 nt, synthetic construct
  source 1..41: mol_type = other RNA
cccccaggtttacatgttcctggtgaaatggcaggacctgt

SEQ ID NO: 28074 - RNA, 41 nt, synthetic construct
  source 1..41: mol_type = other RNA
cccccaggtttacatgttcctggtgaaatggcaggatctgt

SEQ ID NO: 28075 - RNA, 41 nt, synthetic construct
  source 1..41: mol_type = other RNA
cccccaggtgtacatgttcctggtgaaatggcaggatctgt

SEQ ID NO: 28076 - RNA, 41 nt, synthetic construct
  source 1..41: mol_type = other RNA
cccccaggtctacatgttcctggtgaaatggcaggatctgt

SEQ ID NO: 28077 - RNA, 41 nt, synthetic construct
  source 1..41: mol_type = other RNA
cccccaggtatacatgttcctggtgaaatggcaggacctgt

SEQ ID NO: 28078 - RNA, 41 nt, synthetic construct
  source 1..41: mol_type = other RNA
cccccaggtatacatgttcctggtgaaatggcaggatctgt

SEQ ID NO: 28079 - RNA, 41 nt, synthetic construct
  source 1..41: mol_type = other RNA
cccccaggtctacatgttcctggtgaaatggcaggacctgt

SEQ ID NO: 28080 - RNA, 41 nt, synthetic construct
  source 1..41: mol_type = other RNA
cccccaggtgtacatgttcctggtgaaatggcaggacctgt

SEQ ID NO: 28081 - RNA, 42 nt, synthetic construct
  source 1..42: mol_type = other RNA
tcccccaggtatacatgttcctggtgaaatggcaggacctgt

SEQ ID NO: 28082 - RNA, 42 nt, synthetic construct
  source 1..42: mol_type = other RNA
tcccccaggtttacatgttcctggtgaaatggcaggacctgt

SEQ ID NO: 28083 - RNA, 42 nt, synthetic construct
  source 1..42: mol_type = other RNA
tcccccaggtttacatgttcctggtgaaatggcaggatctgt

SEQ ID NO: 28084 - RNA, 42 nt, synthetic construct
  source 1..42: mol_type = other RNA
tcccccaggtctacatgttcctggtgaaatggcaggacctgt

SEQ ID NO: 28085 - RNA, 42 nt, synthetic construct
  source 1..42: mol_type = other RNA
tcccccaggtctacatgttcctggtgaaatggcaggatctgt

SEQ ID NO: 28086 - RNA, 42 nt, synthetic construct
  source 1..42: mol_type = other RNA
tcccccaggtgtacatgttcctggtgaaatggcaggacctgt

SEQ ID NO: 28087 - RNA, 42 nt, synthetic construct
  source 1..42: mol_type = other RNA
tcccccaggtgtacatgttcctggtgaaatggcaggatctgt

SEQ ID NO: 28088 - RNA, 42 nt, synthetic construct
  source 1..42: mol_type = other RNA
tcccccaggtatacatgttcctggtgaaatggcaggatctgt

SEQ ID NO: 28089 - RNA, 43 nt, synthetic construct
  source 1..43: mol_type = other RNA
ttcccccaggtgtacatgttcctggtgaaatggcaggacctgt

SEQ ID NO: 28090 - RNA, 43 nt, synthetic construct
  source 1..43: mol_type = other RNA
ttcccccaggtctacatgttcctggtgaaatggcaggacctgt

SEQ ID NO: 28091 - RNA, 43 nt, synthetic construct
  source 1..43: mol_type = other RNA
ttcccccaggtctacatgttcctggtgaaatggcaggatctgt

SEQ ID NO: 28092 - RNA, 43 nt, synthetic construct
  source 1..43: mol_type = other RNA
ttcccccaggtgtacatgttcctggtgaaatggcaggatctgt

SEQ ID NO: 28093 - RNA, 43 nt, synthetic construct
  source 1..43: mol_type = other RNA
ttcccccaggtatacatgttcctggtgaaatggcaggacctgt

SEQ ID NO: 28094 - RNA, 43 nt, synthetic construct
  source 1..43: mol_type = other RNA
ttcccccaggtttacatgttcctggtgaaatggcaggacctgt

SEQ ID NO: 28095 - RNA, 43 nt, synthetic construct
  source 1..43: mol_type = other RNA
ttcccccaggtatacatgttcctggtgaaatggcaggatctgt

SEQ ID NO: 28096 - RNA, 43 nt, synthetic construct
  source 1..43: mol_type = other RNA
ttcccccaggtttacatgttcctggtgaaatggcaggatctgt

SEQ ID NO: 28097 - RNA, 44 nt, synthetic construct
  source 1..44: mol_type = other RNA
tttcccccaggtttacatgttcctggtgaaatggcaggacctgt

SEQ ID NO: 28098 - RNA, 44 nt, synthetic construct
  source 1..44: mol_type = other RNA
tttcccccaggtgtacatgttcctggtgaaatggcaggatctgt

SEQ ID NO: 28099 - RNA, 44 nt, synthetic construct
  source 1..44: mol_type = other RNA
tttcccccaggtctacatgttcctggtgaaatggcaggatctgt

SEQ ID NO: 28100 - RNA, 44 nt, synthetic construct
  source 1..44: mol_type = other RNA
tttcccccaggtctacatgttcctggtgaaatggcaggacctgt

SEQ ID NO: 28101 - RNA, 44 nt, synthetic construct
  source 1..44: mol_type = other RNA
tttcccccaggtatacatgttcctggtgaaatggcaggatctgt

SEQ ID NO: 28102 - RNA, 44 nt, synthetic construct
  source 1..44: mol_type = other RNA
tttcccccaggtatacatgttcctggtgaaatggcaggacctgt

SEQ ID NO: 28103 - RNA, 44 nt, synthetic construct
  source 1..44: mol_type = other RNA
tttcccccaggtttacatgttcctggtgaaatggcaggatctgt

SEQ ID NO: 28104 - RNA, 44 nt, synthetic construct
  source 1..44: mol_type = other RNA
tttcccccaggtgtacatgttcctggtgaaatggcaggacctgt

SEQ ID NO: 28105 - RNA, 45 nt, synthetic construct
  source 1..45: mol_type = other RNA
ctttcccccaggtatacatgttcctggtgaaatggcaggatctgt

SEQ ID NO: 28106 - RNA, 45 nt, synthetic construct
  source 1..45: mol_type = other RNA
ctttcccccaggtatacatgttcctggtgaaatggcaggacctgt

SEQ ID NO: 28107 - RNA, 45 nt, synthetic construct
  source 1..45: mol_type = other RNA
ctttcccccaggtgtacatgttcctggtgaaatggcaggatctgt

SEQ ID NO: 28108 - RNA, 45 nt, synthetic construct
  source 1..45: mol_type = other RNA
ctttcccccaggtttacatgttcctggtgaaatggcaggacctgt

SEQ ID NO: 28109 - RNA, 45 nt, synthetic construct
  source 1..45: mol_type = other RNA
ctttcccccaggtctacatgttcctggtgaaatggcaggatctgt

SEQ ID NO: 28110 - RNA, 45 nt, synthetic construct
  source 1..45: mol_type = other RNA
ctttcccccaggtttacatgttcctggtgaaatggcaggatctgt

SEQ ID NO: 28111 - RNA, 45 nt, synthetic construct
  source 1..45: mol_type = other RNA
ctttcccccaggtctacatgttcctggtgaaatggcaggacctgt

SEQ ID NO: 28112 - RNA, 45 nt, synthetic construct
  source 1..45: mol_type = other RNA
ctttcccccaggtgtacatgttcctggtgaaatggcaggacctgt

SEQ ID NO: 28113 - RNA, 46 nt, synthetic construct
  source 1..46: mol_type = other RNA
gctttcccccaggtttacatgttcctggtgaaatggcaggatctgt

SEQ ID NO: 28114 - RNA, 46 nt, synthetic construct
  source 1..46: mol_type = other RNA
gctttcccccaggtatacatgttcctggtgaaatggcaggatctgt

SEQ ID NO: 28115 - RNA, 46 nt, synthetic construct
  source 1..46: mol_type = other RNA
gctttcccccaggtctacatgttcctggtgaaatggcaggacctgt

SEQ ID NO: 28116 - RNA, 46 nt, synthetic construct
  source 1..46: mol_type = other RNA
gctttcccccaggtctacatgttcctggtgaaatggcaggatctgt

SEQ ID NO: 28117 - RNA, 46 nt, synthetic construct
  source 1..46: mol_type = other RNA
gctttcccccaggtgtacatgttcctggtgaaatggcaggacctgt

SEQ ID NO: 28118 - RNA, 46 nt, synthetic construct
  source 1..46: mol_type = other RNA
gctttcccccaggtttacatgttcctggtgaaatggcaggacctgt

SEQ ID NO: 28119 - RNA, 46 nt, synthetic construct
  source 1..46: mol_type = other RNA
gctttcccccaggtgtacatgttcctggtgaaatggcaggatctgt

SEQ ID NO: 28120 - RNA, 46 nt, synthetic construct
  source 1..46: mol_type = other RNA
gctttcccccaggtatacatgttcctggtgaaatggcaggacctgt

SEQ ID NO: 28121 - RNA, 47 nt, synthetic construct
  source 1..47: mol_type = other RNA
ggctttcccccaggtgtacatgttcctggtgaaatggcaggatctgt

SEQ ID NO: 28122 - RNA, 47 nt, synthetic construct
  source 1..47: mol_type = other RNA
ggctttcccccaggtttacatgttcctggtgaaatggcaggacctgt

SEQ ID NO: 28123 - RNA, 47 nt, synthetic construct
  source 1..47: mol_type = other RNA
ggctttcccccaggtgtacatgttcctggtgaaatggcaggacctgt

SEQ ID NO: 28124 - RNA, 47 nt, synthetic construct
  source 1..47: mol_type = other RNA
ggctttcccccaggtctacatgttcctggtgaaatggcaggatctgt

SEQ ID NO: 28125 - RNA, 47 nt, synthetic construct
  source 1..47: mol_type = other RNA
ggctttcccccaggtctacatgttcctggtgaaatggcaggacctgt

SEQ ID NO: 28126 - RNA, 47 nt, synthetic construct
  source 1..47: mol_type = other RNA
ggctttcccccaggtatacatgttcctggtgaaatggcaggatctgt

SEQ ID NO: 28127 - RNA, 47 nt, synthetic construct
  source 1..47: mol_type = other RNA
ggctttcccccaggtatacatgttcctggtgaaatggcaggacctgt

SEQ ID NO: 28128 - RNA, 47 nt, synthetic construct
  source 1..47: mol_type = other RNA
ggctttcccccaggtttacatgttcctggtgaaatggcaggatctgt

SEQ ID NO: 28129 - RNA, 48 nt, synthetic construct
  source 1..48: mol_type = other RNA
tggctttcccccaggtgtacatgttcctggtgaaatggcaggacctgt

SEQ ID NO: 28130 - RNA, 48 nt, synthetic construct
  source 1..48: mol_type = other RNA
tggctttcccccaggtatacatgttcctggtgaaatggcaggatctgt

SEQ ID NO: 28131 - RNA, 48 nt, synthetic construct
  source 1..48: mol_type = other RNA
tggctttcccccaggtctacatgttcctggtgaaatggcaggacctgt

SEQ ID NO: 28132 - RNA, 48 nt, synthetic construct
  source 1..48: mol_type = other RNA
tggctttcccccaggtctacatgttcctggtgaaatggcaggatctgt

SEQ ID NO: 28133 - RNA, 48 nt, synthetic construct
  source 1..48: mol_type = other RNA
tggctttcccccaggtgtacatgttcctggtgaaatggcaggatctgt

SEQ ID NO: 28134 - RNA, 48 nt, synthetic construct
  source 1..48: mol_type = other RNA
tggctttcccccaggtttacatgttcctggtgaaatggcaggacctgt

SEQ ID NO: 28135 - RNA, 48 nt, synthetic construct
  source 1..48: mol_type = other RNA
tggctttcccccaggtatacatgttcctggtgaaatggcaggacctgt

SEQ ID NO: 28136 - RNA, 48 nt, synthetic construct
  source 1..48: mol_type = other RNA
tggctttcccccaggtttacatgttcctggtgaaatggcaggatctgt

SEQ ID NO: 28137 - RNA, 49 nt, synthetic construct
  source 1..49: mol_type = other RNA
ctggctttcccccaggtgtacatgttcctggtgaaatggcaggatctgt

SEQ ID NO: 28138 - RNA, 49 nt, synthetic construct
  source 1..49: mol_type = other RNA
ctggctttcccccaggtttacatgttcctggtgaaatggcaggacctgt

SEQ ID NO: 28139 - RNA, 49 nt, synthetic construct
  source 1..49: mol_type = other RNA
ctggctttcccccaggtctacatgttcctggtgaaatggcaggatctgt

SEQ ID NO: 28140 - RNA, 49 nt, synthetic construct
  source 1..49: mol_type = other RNA
ctggctttcccccaggtgtacatgttcctggtgaaatggcaggacctgt

SEQ ID NO: 28141 - RNA, 49 nt, synthetic construct
  source 1..49: mol_type = other RNA
ctggctttcccccaggtctacatgttcctggtgaaatggcaggacctgt

SEQ ID NO: 28142 - RNA, 49 nt, synthetic construct
  source 1..49: mol_type = other RNA
ctggctttcccccaggtatacatgttcctggtgaaatggcaggacctgt

SEQ ID NO: 28143 - RNA, 49 nt, synthetic construct
  source 1..49: mol_type = other RNA
ctggctttcccccaggtatacatgttcctggtgaaatggcaggatctgt

SEQ ID NO: 28144 - RNA, 49 nt, synthetic construct
  source 1..49: mol_type = other RNA
ctggctttcccccaggtttacatgttcctggtgaaatggcaggatctgt

SEQ ID NO: 28145 - RNA, 50 nt, synthetic construct
  source 1..50: mol_type = other RNA
tctggctttcccccaggtctacatgttcctggtgaaatggcaggatctgt

SEQ ID NO: 28146 - RNA, 50 nt, synthetic construct
  source 1..50: mol_type = other RNA
tctggctttcccccaggtgtacatgttcctggtgaaatggcaggatctgt

SEQ ID NO: 28147 - RNA, 50 nt, synthetic construct
  source 1..50: mol_type = other RNA
tctggctttcccccaggtgtacatgttcctggtgaaatggcaggacctgt

SEQ ID NO: 28148 - RNA, 50 nt, synthetic construct
  source 1..50: mol_type = other RNA
tctggctttcccccaggtatacatgttcctggtgaaatggcaggacctgt

SEQ ID NO: 28149 - RNA, 50 nt, synthetic construct
  source 1..50: mol_type = other RNA
tctggctttcccccaggtatacatgttcctggtgaaatggcaggatctgt

SEQ ID NO: 28150 - RNA, 50 nt, synthetic construct
  source 1..50: mol_type = other RNA
tctggctttcccccaggtctacatgttcctggtgaaatggcaggacctgt

SEQ ID NO: 28151 - RNA, 50 nt, synthetic construct
  source 1..50: mol_type = other RNA
tctggctttcccccaggtttacatgttcctggtgaaatggcaggatctgt

SEQ ID NO: 28152 - RNA, 50 nt, synthetic construct
  source 1..50: mol_type = other RNA
tctggctttcccccaggtttacatgttcctggtgaaatggcaggacctgt

SEQ ID NO: 28153 - RNA, 51 nt, synthetic construct
  source 1..51: mol_type = other RNA
ctctggctttcccccaggtttacatgttcctggtgaaatggcaggacctgt

SEQ ID NO: 28154 - RNA, 51 nt, synthetic construct
  source 1..51: mol_type = other RNA
ctctggctttcccccaggtgtacatgttcctggtgaaatggcaggacctgt

SEQ ID NO: 28155 - RNA, 51 nt, synthetic construct
  source 1..51: mol_type = other RNA
ctctggctttcccccaggtttacatgttcctggtgaaatggcaggatctgt

SEQ ID NO: 28156 - RNA, 51 nt, synthetic construct
  source 1..51: mol_type = other RNA
ctctggctttcccccaggtctacatgttcctggtgaaatggcaggacctgt

SEQ ID NO: 28157 - RNA, 51 nt, synthetic construct
  source 1..51: mol_type = other RNA
ctctggctttcccccaggtgtacatgttcctggtgaaatggcaggatctgt

SEQ ID NO: 28158 - RNA, 51 nt, synthetic construct
  source 1..51: mol_type = other RNA
ctctggctttcccccaggtctacatgttcctggtgaaatggcaggatctgt

SEQ ID NO: 28159 - RNA, 51 nt, synthetic construct
  source 1..51: mol_type = other RNA
ctctggctttcccccaggtatacatgttcctggtgaaatggcaggacctgt

SEQ ID NO: 28160 - RNA, 51 nt, synthetic construct
  source 1..51: mol_type = other RNA
ctctggctttcccccaggtatacatgttcctggtgaaatggcaggatctgt

SEQ ID NO: 28161 - RNA, 52 nt, synthetic construct
  source 1..52: mol_type = other RNA
actctggctttcccccaggtgtacatgttcctggtgaaatggcaggatctgt

SEQ ID NO: 28162 - RNA, 52 nt, synthetic construct
  source 1..52: mol_type = other RNA
actctggctttcccccaggtttacatgttcctggtgaaatggcaggatctgt

SEQ ID NO: 28163 - RNA, 52 nt, synthetic construct
  source 1..52: mol_type = other RNA
actctggctttcccccaggtttacatgttcctggtgaaatggcaggacctgt

SEQ ID NO: 28164 - RNA, 52 nt, synthetic construct
  source 1..52: mol_type = other RNA
actctggctttcccccaggtctacatgttcctggtgaaatggcaggatctgt

SEQ ID NO: 28165 - RNA, 52 nt, synthetic construct
  source 1..52: mol_type = other RNA
actctggctttcccccaggtgtacatgttcctggtgaaatggcaggacctgt

SEQ ID NO: 28166 - RNA, 52 nt, synthetic construct
  source 1..52: mol_type = other RNA
actctggctttcccccaggtctacatgttcctggtgaaatggcaggacctgt

SEQ ID NO: 28167 - RNA, 52 nt, synthetic construct
  source 1..52: mol_type = other RNA
actctggctttcccccaggtatacatgttcctggtgaaatggcaggacctgt

SEQ ID NO: 28168 - RNA, 52 nt, synthetic construct
  source 1..52: mol_type = other RNA
actctggctttcccccaggtatacatgttcctggtgaaatggcaggatctgt

SEQ ID NO: 28169 - RNA, 53 nt, synthetic construct
  source 1..53: mol_type = other RNA
gactctggctttcccccaggtttacatgttcctggtgaaatggcaggatctgt

SEQ ID NO: 28170 - RNA, 53 nt, synthetic construct
  source 1..53: mol_type = other RNA
gactctggctttcccccaggtgtacatgttcctggtgaaatggcaggatctgt

SEQ ID NO: 28171 - RNA, 53 nt, synthetic construct
  source 1..53: mol_type = other RNA
gactctggctttcccccaggtctacatgttcctggtgaaatggcaggatctgt

SEQ ID NO: 28172 - RNA, 53 nt, synthetic construct
  source 1..53: mol_type = other RNA
gactctggctttcccccaggtatacatgttcctggtgaaatggcaggatctgt

SEQ ID NO: 28173 - RNA, 53 nt, synthetic construct
  source 1..53: mol_type = other RNA
gactctggctttcccccaggtatacatgttcctggtgaaatggcaggacctgt

SEQ ID NO: 28174 - RNA, 53 nt, synthetic construct
  source 1..53: mol_type = other RNA
gactctggctttcccccaggtctacatgttcctggtgaaatggcaggacctgt

SEQ ID NO: 28175 - RNA, 53 nt, synthetic construct
  source 1..53: mol_type = other RNA
gactctggctttcccccaggtttacatgttcctggtgaaatggcaggacctgt

SEQ ID NO: 28176 - RNA, 53 nt, synthetic construct
  source 1..53: mol_type = other RNA
gactctggctttcccccaggtgtacatgttcctggtgaaatggcaggacctgt

SEQ ID NO: 28177 - RNA, 54 nt, synthetic construct
  source 1..54: mol_type = other RNA
cgactctggctttcccccaggtctacatgttcctggtgaaatggcaggacctgt

SEQ ID NO: 28178 - RNA, 54 nt, synthetic construct
  source 1..54: mol_type = other RNA
cgactctggctttcccccaggtgtacatgttcctggtgaaatggcaggacctgt

SEQ ID NO: 28179 - RNA, 54 nt, synthetic construct
  source 1..54: mol_type = other RNA
cgactctggctttcccccaggtgtacatgttcctggtgaaatggcaggatctgt

SEQ ID NO: 28180 - RNA, 54 nt, synthetic construct
  source 1..54: mol_type = other RNA
cgactctggctttcccccaggtttacatgttcctggtgaaatggcaggacctgt

SEQ ID NO: 28181 - RNA, 54 nt, synthetic construct
  source 1..54: mol_type = other RNA
cgactctggctttcccccaggtttacatgttcctggtgaaatggcaggatctgt

SEQ ID NO: 28182 - RNA, 54 nt, synthetic construct
  source 1..54: mol_type = other RNA
cgactctggctttcccccaggtatacatgttcctggtgaaatggcaggacctgt

SEQ ID NO: 28183 - RNA, 54 nt, synthetic construct
  source 1..54: mol_type = other RNA
cgactctggctttcccccaggtatacatgttcctggtgaaatggcaggatctgt

SEQ ID NO: 28184 - RNA, 54 nt, synthetic construct
  source 1..54: mol_type = other RNA
cgactctggctttcccccaggtctacatgttcctggtgaaatggcaggatctgt

SEQ ID NO: 28185 - RNA, 55 nt, synthetic construct
  source 1..55: mol_type = other RNA
ccgactctggctttcccccaggtgtacatgttcctggtgaaatggcaggatctgt

SEQ ID NO: 28186 - RNA, 55 nt, synthetic construct
  source 1..55: mol_type = other RNA
ccgactctggctttcccccaggtgtacatgttcctggtgaaatggcaggacctgt

SEQ ID NO: 28187 - RNA, 55 nt, synthetic construct
  source 1..55: mol_type = other RNA
ccgactctggctttcccccaggtctacatgttcctggtgaaatggcaggacctgt

SEQ ID NO: 28188 - RNA, 55 nt, synthetic construct
  source 1..55: mol_type = other RNA
ccgactctggctttcccccaggtctacatgttcctggtgaaatggcaggatctgt

SEQ ID NO: 28189 - RNA, 55 nt, synthetic construct
  source 1..55: mol_type = other RNA
ccgactctggctttcccccaggtatacatgttcctggtgaaatggcaggatctgt

SEQ ID NO: 28190 - RNA, 55 nt, synthetic construct
  source 1..55: mol_type = other RNA
ccgactctggctttcccccaggtttacatgttcctggtgaaatggcaggacctgt

SEQ ID NO: 28191 - RNA, 55 nt, synthetic construct
  source 1..55: mol_type = other RNA
ccgactctggctttcccccaggtttacatgttcctggtgaaatggcaggatctgt

SEQ ID NO: 28192 - RNA, 55 nt, synthetic construct
  source 1..55: mol_type = other RNA
ccgactctggctttcccccaggtatacatgttcctggtgaaatggcaggacctgt

SEQ ID NO: 28193 - RNA, 56 nt, synthetic construct
  source 1..56: mol_type = other RNA
cccgactctggctttcccccaggtgtacatgttcctggtgaaatggcaggatctgt

SEQ ID NO: 28194 - RNA, 56 nt, synthetic construct
  source 1..56: mol_type = other RNA
cccgactctggctttcccccaggtctacatgttcctggtgaaatggcaggacctgt

SEQ ID NO: 28195 - RNA, 56 nt, synthetic construct
  source 1..56: mol_type = other RNA
cccgactctggctttcccccaggtatacatgttcctggtgaaatggcaggacctgt

SEQ ID NO: 28196 - RNA, 56 nt, synthetic construct
  source 1..56: mol_type = other RNA
cccgactctggctttcccccaggtatacatgttcctggtgaaatggcaggatctgt

SEQ ID NO: 28197 - RNA, 56 nt, synthetic construct
  source 1..56: mol_type = other RNA
cccgactctggctttcccccaggtttacatgttcctggtgaaatggcaggacctgt

SEQ ID NO: 28198 - RNA, 56 nt, synthetic construct
  source 1..56: mol_type = other RNA
cccgactctggctttcccccaggtctacatgttcctggtgaaatggcaggatctgt

SEQ ID NO: 28199 - RNA, 56 nt, synthetic construct
  source 1..56: mol_type = other RNA
cccgactctggctttcccccaggtgtacatgttcctggtgaaatggcaggacctgt

SEQ ID NO: 28200 - RNA, 56 nt, synthetic construct
  source 1..56: mol_type = other RNA
cccgactctggctttcccccaggtttacatgttcctggtgaaatggcaggatctgt

SEQ ID NO: 28201 - RNA, 57 nt, synthetic construct
  source 1..57: mol_type = other RNA
ccccgactctggctttcccccaggtctacatgttcctggtgaaatggcaggacctgt

SEQ ID NO: 28202 - RNA, 57 nt, synthetic construct
  source 1..57: mol_type = other RNA
ccccgactctggctttcccccaggtatacatgttcctggtgaaatggcaggacctgt

SEQ ID NO: 28203 - RNA, 57 nt, synthetic construct
  source 1..57: mol_type = other RNA
ccccgactctggctttcccccaggtatacatgttcctggtgaaatggcaggatctgt

SEQ ID NO: 28204 - RNA, 57 nt, synthetic construct
  source 1..57: mol_type = other RNA
ccccgactctggctttcccccaggtctacatgttcctggtgaaatggcaggatctgt

SEQ ID NO: 28205 - RNA, 57 nt, synthetic construct
  source 1..57: mol_type = other RNA
ccccgactctggctttcccccaggtgtacatgttcctggtgaaatggcaggacctgt

SEQ ID NO: 28206 - RNA, 57 nt, synthetic construct
  source 1..57: mol_type = other RNA
ccccgactctggctttcccccaggtgtacatgttcctggtgaaatggcaggatctgt

SEQ ID NO: 28207 - RNA, 57 nt, synthetic construct
  source 1..57: mol_type = other RNA
ccccgactctggctttcccccaggtttacatgttcctggtgaaatggcaggatctgt

SEQ ID NO: 28208 - RNA, 57 nt, synthetic construct
  source 1..57: mol_type = other RNA
ccccgactctggctttcccccaggtttacatgttcctggtgaaatggcaggacctgt

SEQ ID NO: 28209 - RNA, 58 nt, synthetic construct
  source 1..58: mol_type = other RNA
cccccgactctggctttcccccaggtttacatgttcctggtgaaatggcaggatctgt

SEQ ID NO: 28210 - RNA, 58 nt, synthetic construct
  source 1..58: mol_type = other RNA
cccccgactctggctttcccccaggtttacatgttcctggtgaaatggcaggacctgt

SEQ ID NO: 28211 - RNA, 58 nt, synthetic construct
  source 1..58: mol_type = other RNA
cccccgactctggctttcccccaggtgtacatgttcctggtgaaatggcaggatctgt

SEQ ID NO: 28212 - RNA, 58 nt, synthetic construct
  source 1..58: mol_type = other RNA
cccccgactctggctttcccccaggtctacatgttcctggtgaaatggcaggatctgt

SEQ ID NO: 28213 - RNA, 58 nt, synthetic construct
  source 1..58: mol_type = other RNA
cccccgactctggctttcccccaggtctacatgttcctggtgaaatggcaggacctgt

SEQ ID NO: 28214 - RNA, 58 nt, synthetic construct
  source 1..58: mol_type = other RNA
cccccgactctggctttcccccaggtatacatgttcctggtgaaatggcaggatctgt

SEQ ID NO: 28215 - RNA, 58 nt, synthetic construct
  source 1..58: mol_type = other RNA
cccccgactctggctttcccccaggtatacatgttcctggtgaaatggcaggacctgt

SEQ ID NO: 28216 - RNA, 58 nt, synthetic construct
  source 1..58: mol_type = other RNA
cccccgactctggctttcccccaggtgtacatgttcctggtgaaatggcaggacctgt

SEQ ID NO: 28217 - RNA, 59 nt, synthetic construct
  source 1..59: mol_type = other RNA
tcccccgactctggctttcccccaggtttacatgttcctggtgaaatggcaggacctgt

SEQ ID NO: 28218 - RNA, 59 nt, synthetic construct
  source 1..59: mol_type = other RNA
tcccccgactctggctttcccccaggtgtacatgttcctggtgaaatggcaggacctgt

SEQ ID NO: 28219 - RNA, 59 nt, synthetic construct
  source 1..59: mol_type = other RNA
tcccccgactctggctttcccccaggtctacatgttcctggtgaaatggcaggatctgt

SEQ ID NO: 28220 - RNA, 59 nt, synthetic construct
  source 1..59: mol_type = other RNA
tcccccgactctggctttcccccaggtgtacatgttcctggtgaaatggcaggatctgt

SEQ ID NO: 28221 - RNA, 59 nt, synthetic construct
  source 1..59: mol_type = other RNA
tcccccgactctggctttcccccaggtatacatgttcctggtgaaatggcaggatctgt

SEQ ID NO: 28222 - RNA, 59 nt, synthetic construct
  source 1..59: mol_type = other RNA
tcccccgactctggctttcccccaggtttacatgttcctggtgaaatggcaggatctgt

SEQ ID NO: 28223 - RNA, 59 nt, synthetic construct
  source 1..59: mol_type = other RNA
tcccccgactctggctttcccccaggtctacatgttcctggtgaaatggcaggacctgt

SEQ ID NO: 28224 - RNA, 59 nt, synthetic construct
  source 1..59: mol_type = other RNA
tcccccgactctggctttcccccaggtatacatgttcctggtgaaatggcaggacctgt

SEQ ID NO: 28225 - RNA, 60 nt, synthetic construct
  source 1..60: mol_type = other RNA
gtcccccgactctggctttcccccaggtatacatgttcctggtgaaatggcaggatctgt

SEQ ID NO: 28226 - RNA, 60 nt, synthetic construct
  source 1..60: mol_type = other RNA
gtcccccgactctggctttcccccaggtctacatgttcctggtgaaatggcaggacctgt

SEQ ID NO: 28227 - RNA, 60 nt, synthetic construct
  source 1..60: mol_type = other RNA
gtcccccgactctggctttcccccaggtttacatgttcctggtgaaatggcaggatctgt

SEQ ID NO: 28228 - RNA, 60 nt, synthetic construct
  source 1..60: mol_type = other RNA
gtcccccgactctggctttcccccaggtgtacatgttcctggtgaaatggcaggacctgt

SEQ ID NO: 28229 - RNA, 60 nt, synthetic construct
  source 1..60: mol_type = other RNA
gtcccccgactctggctttcccccaggtttacatgttcctggtgaaatggcaggacctgt

SEQ ID NO: 28230 - RNA, 60 nt, synthetic construct
  source 1..60: mol_type = other RNA
gtcccccgactctggctttcccccaggtgtacatgttcctggtgaaatggcaggatctgt

SEQ ID NO: 28231 - RNA, 60 nt, synthetic construct
  source 1..60: mol_type = other RNA
gtcccccgactctggctttcccccaggtatacatgttcctggtgaaatggcaggacctgt

SEQ ID NO: 28232 - RNA, 60 nt, synthetic construct
  source 1..60: mol_type = other RNA
gtcccccgactctggctttcccccaggtctacatgttcctggtgaaatggcaggatctgt

SEQ ID NO: 28233 - RNA, 61 nt, synthetic construct
  source 1..61: mol_type = other RNA
ggtcccccgactctggctttcccccaggtctacatgttcctggtgaaatggcaggatctgt

SEQ ID NO: 28234 - RNA, 61 nt, synthetic construct
  source 1..61: mol_type = other RNA
ggtcccccgactctggctttcccccaggtttacatgttcctggtgaaatggcaggacctgt

SEQ ID NO: 28235 - RNA, 61 nt, synthetic construct
  source 1..61: mol_type = other RNA
ggtcccccgactctggctttcccccaggtgtacatgttcctggtgaaatggcaggatctgt

SEQ ID NO: 28236 - RNA, 61 nt, synthetic construct
  source 1..61: mol_type = other RNA
ggtcccccgactctggctttcccccaggtctacatgttcctggtgaaatggcaggacctgt

SEQ ID NO: 28237 - RNA, 61 nt, synthetic construct
  source 1..61: mol_type = other RNA
ggtcccccgactctggctttcccccaggtttacatgttcctggtgaaatggcaggatctgt

SEQ ID NO: 28238 - RNA, 61 nt, synthetic construct
  source 1..61: mol_type = other RNA
ggtcccccgactctggctttcccccaggtatacatgttcctggtgaaatggcaggacctgt

SEQ ID NO: 28239 - RNA, 61 nt, synthetic construct
  source 1..61: mol_type = other RNA
ggtcccccgactctggctttcccccaggtatacatgttcctggtgaaatggcaggatctgt

SEQ ID NO: 28240 - RNA, 61 nt, synthetic construct
  source 1..61: mol_type = other RNA
ggtcccccgactctggctttcccccaggtgtacatgttcctggtgaaatggcaggacctgt

SEQ ID NO: 28241 - RNA, 62 nt, synthetic construct
  source 1..62: mol_type = other RNA
gggtcccccgactctggctttcccccaggtgtacatgttcctggtgaaatggcaggacctgt

SEQ ID NO: 28242 - RNA, 62 nt, synthetic construct
  source 1..62: mol_type = other RNA
gggtcccccgactctggctttcccccaggtgtacatgttcctggtgaaatggcaggatctgt

SEQ ID NO: 28243 - RNA, 62 nt, synthetic construct
  source 1..62: mol_type = other RNA
gggtcccccgactctggctttcccccaggtttacatgttcctggtgaaatggcaggatctgt

SEQ ID NO: 28244 - RNA, 62 nt, synthetic construct
  source 1..62: mol_type = other RNA
gggtcccccgactctggctttcccccaggtttacatgttcctggtgaaatggcaggacctgt

SEQ ID NO: 28245 - RNA, 62 nt, synthetic construct
  source 1..62: mol_type = other RNA
gggtcccccgactctggctttcccccaggtctacatgttcctggtgaaatggcaggacctgt

SEQ ID NO: 28246 - RNA, 62 nt, synthetic construct
  source 1..62: mol_type = other RNA
gggtcccccgactctggctttcccccaggtctacatgttcctggtgaaatggcaggatctgt

SEQ ID NO: 28247 - RNA, 62 nt, synthetic construct
  source 1..62: mol_type = other RNA
gggtcccccgactctggctttcccccaggtatacatgttcctggtgaaatggcaggatctgt

SEQ ID NO: 28248 - RNA, 62 nt, synthetic construct
  source 1..62: mol_type = other RNA
gggtcccccgactctggctttcccccaggtatacatgttcctggtgaaatggcaggacctgt

SEQ ID NO: 28249 - RNA, 63 nt, synthetic construct
  source 1..63: mol_type = other RNA
ggggtcccccgactctggctttcccccaggtttacatgttcctggtgaaatggcaggatctgt

SEQ ID NO: 28250 - RNA, 63 nt, synthetic construct
  source 1..63: mol_type = other RNA
ggggtcccccgactctggctttcccccaggtttacatgttcctggtgaaatggcaggacctgt

SEQ ID NO: 28251 - RNA, 63 nt, synthetic construct
  source 1..63: mol_type = other RNA
ggggtcccccgactctggctttcccccaggtgtacatgttcctggtgaaatggcaggacctgt

SEQ ID NO: 28252 - RNA, 63 nt, synthetic construct
  source 1..63: mol_type = other RNA
ggggtcccccgactctggctttcccccaggtctacatgttcctggtgaaatggcaggatctgt

SEQ ID NO: 28253 - RNA, 63 nt, synthetic construct
  source 1..63: mol_type = other RNA
ggggtcccccgactctggctttcccccaggtatacatgttcctggtgaaatggcaggatctgt

SEQ ID NO: 28254 - RNA, 63 nt, synthetic construct
  source 1..63: mol_type = other RNA
ggggtcccccgactctggctttcccccaggtatacatgttcctggtgaaatggcaggacctgt

SEQ ID NO: 28255 - RNA, 63 nt, synthetic construct
  source 1..63: mol_type = other RNA
ggggtcccccgactctggctttcccccaggtgtacatgttcctggtgaaatggcaggatctgt

SEQ ID NO: 28256 - RNA, 63 nt, synthetic construct
  source 1..63: mol_type = other RNA
ggggtcccccgactctggctttcccccaggtctacatgttcctggtgaaatggcaggacctgt

SEQ ID NO: 28257 - RNA, 64 nt, synthetic construct
  source 1..64: mol_type = other RNA
tggggtcccccgactctggctttcccccaggtctacatgttcctggtgaaatggcaggatctgt

SEQ ID NO: 28258 - RNA, 64 nt, synthetic construct
  source 1..64: mol_type = other RNA
tggggtcccccgactctggctttcccccaggtgtacatgttcctggtgaaatggcaggacctgt

SEQ ID NO: 28259 - RNA, 64 nt, synthetic construct
  source 1..64: mol_type = other RNA
tggggtcccccgactctggctttcccccaggtttacatgttcctggtgaaatggcaggatctgt

SEQ ID NO: 28260 - RNA, 64 nt, synthetic construct
  source 1..64: mol_type = other RNA
tggggtcccccgactctggctttcccccaggtgtacatgttcctggtgaaatggcaggatctgt

SEQ ID NO: 28261 - RNA, 64 nt, synthetic construct
  source 1..64: mol_type = other RNA
tggggtcccccgactctggctttcccccaggtatacatgttcctggtgaaatggcaggacctgt

SEQ ID NO: 28262 - RNA, 64 nt, synthetic construct
  source 1..64: mol_type = other RNA
tggggtcccccgactctggctttcccccaggtatacatgttcctggtgaaatggcaggatctgt

SEQ ID NO: 28263 - RNA, 64 nt, synthetic construct
  source 1..64: mol_type = other RNA
tggggtcccccgactctggctttcccccaggtctacatgttcctggtgaaatggcaggacctgt

SEQ ID NO: 28264 - RNA, 64 nt, synthetic construct
  source 1..64: mol_type = other RNA
tggggtcccccgactctggctttcccccaggtttacatgttcctggtgaaatggcaggacctgt

SEQ ID NO: 28265 - RNA, 65 nt, synthetic construct
  source 1..65: mol_type = other RNA
atggggtcccccgactctggctttcccccaggtttacatgttcctggtgaaatggcaggacctgt

SEQ ID NO: 28266 - RNA, 65 nt, synthetic construct
  source 1..65: mol_type = other RNA
atggggtcccccgactctggctttcccccaggtgtacatgttcctggtgaaatggcaggatctgt

SEQ ID NO: 28267 - RNA, 65 nt, synthetic construct
  source 1..65: mol_type = other RNA
atggggtcccccgactctggctttcccccaggtctacatgttcctggtgaaatggcaggacctgt

SEQ ID NO: 28268 - RNA, 65 nt, synthetic construct
  source 1..65: mol_type = other RNA
atggggtcccccgactctggctttcccccaggtatacatgttcctggtgaaatggcaggacctgt

SEQ ID NO: 28269 - RNA, 65 nt, synthetic construct
  source 1..65: mol_type = other RNA
atggggtcccccgactctggctttcccccaggtttacatgttcctggtgaaatggcaggatctgt

SEQ ID NO: 28270 - RNA, 65 nt, synthetic construct
  source 1..65: mol_type = other RNA
atggggtcccccgactctggctttcccccaggtatacatgttcctggtgaaatggcaggatctgt

SEQ ID NO: 28271 - RNA, 65 nt, synthetic construct
  source 1..65: mol_type = other RNA
atggggtcccccgactctggctttcccccaggtctacatgttcctggtgaaatggcaggatctgt

SEQ ID NO: 28272 - RNA, 65 nt, synthetic construct
  source 1..65: mol_type = other RNA
atggggtcccccgactctggctttcccccaggtgtacatgttcctggtgaaatggcaggacctgt

SEQ ID NO: 28273 - RNA, 66 nt, synthetic construct
  source 1..66: mol_type = other RNA
aatggggtcccccgactctggctttcccccaggtttacatgttcctggtgaaatggcaggatctgt

SEQ ID NO: 28274 - RNA, 66 nt, synthetic construct
  source 1..66: mol_type = other RNA
aatggggtcccccgactctggctttcccccaggtttacatgttcctggtgaaatggcaggacctgt

SEQ ID NO: 28275 - RNA, 66 nt, synthetic construct
  source 1..66: mol_type = other RNA
aatggggtcccccgactctggctttcccccaggtgtacatgttcctggtgaaatggcaggatctgt

SEQ ID NO: 28276 - RNA, 66 nt, synthetic construct
  source 1..66: mol_type = other RNA
aatggggtcccccgactctggctttcccccaggtctacatgttcctggtgaaatggcaggatctgt

SEQ ID NO: 28277 - RNA, 66 nt, synthetic construct
  source 1..66: mol_type = other RNA
aatggggtcccccgactctggctttcccccaggtctacatgttcctggtgaaatggcaggacctgt

SEQ ID NO: 28278 - RNA, 66 nt, synthetic construct
  source 1..66: mol_type = other RNA
aatggggtcccccgactctggctttcccccaggtatacatgttcctggtgaaatggcaggacctgt

SEQ ID NO: 28279 - RNA, 66 nt, synthetic construct
  source 1..66: mol_type = other RNA
aatggggtcccccgactctggctttcccccaggtgtacatgttcctggtgaaatggcaggacctgt

SEQ ID NO: 28280 - RNA, 66 nt, synthetic construct
  source 1..66: mol_type = other RNA
aatggggtcccccgactctggctttcccccaggtatacatgttcctggtgaaatggcaggatctgt

SEQ ID NO: 28281 - RNA, 67 nt, synthetic construct
  source 1..67: mol_type = other RNA
gaatggggtcccccgactctggctttcccccaggtctacatgttcctggtgaaatggcaggacctgt

SEQ ID NO: 28282 - RNA, 67 nt, synthetic construct
  source 1..67: mol_type = other RNA
gaatggggtcccccgactctggctttcccccaggtttacatgttcctggtgaaatggcaggatctgt

SEQ ID NO: 28283 - RNA, 67 nt, synthetic construct
  source 1..67: mol_type = other RNA
gaatggggtcccccgactctggctttcccccaggtgtacatgttcctggtgaaatggcaggatctgt

SEQ ID NO: 28284 - RNA, 67 nt, synthetic construct
  source 1..67: mol_type = other RNA
gaatggggtcccccgactctggctttcccccaggtttacatgttcctggtgaaatggcaggacctgt

SEQ ID NO: 28285 - RNA, 67 nt, synthetic construct
  source 1..67: mol_type = other RNA
gaatggggtcccccgactctggctttcccccaggtgtacatgttcctggtgaaatggcaggacctgt

SEQ ID NO: 28286 - RNA, 67 nt, synthetic construct
  source 1..67: mol_type = other RNA
gaatggggtcccccgactctggctttcccccaggtctacatgttcctggtgaaatggcaggatctgt

SEQ ID NO: 28287 - RNA, 67 nt, synthetic construct
  source 1..67: mol_type = other RNA
gaatggggtcccccgactctggctttcccccaggtatacatgttcctggtgaaatggcaggatctgt

SEQ ID NO: 28288 - RNA, 67 nt, synthetic construct
  source 1..67: mol_type = other RNA
gaatggggtcccccgactctggctttcccccaggtatacatgttcctggtgaaatggcaggacctgt

SEQ ID NO: 28289 - RNA, 68 nt, synthetic construct
  source 1..68: mol_type = other RNA
tgaatggggtcccccgactctggctttcccccaggtttacatgttcctggtgaaatggcaggatctgt

SEQ ID NO: 28290 - RNA, 68 nt, synthetic construct
  source 1..68: mol_type = other RNA
tgaatggggtcccccgactctggctttcccccaggtatacatgttcctggtgaaatggcaggatctgt

SEQ ID NO: 28291 - RNA, 68 nt, synthetic construct
  source 1..68: mol_type = other RNA
tgaatggggtcccccgactctggctttcccccaggtctacatgttcctggtgaaatggcaggacctgt

SEQ ID NO: 28292 - RNA, 68 nt, synthetic construct
  source 1..68: mol_type = other RNA
tgaatggggtcccccgactctggctttcccccaggtctacatgttcctggtgaaatggcaggatctgt

SEQ ID NO: 28293 - RNA, 68 nt, synthetic construct
  source 1..68: mol_type = other RNA
tgaatggggtcccccgactctggctttcccccaggtgtacatgttcctggtgaaatggcaggacctgt

SEQ ID NO: 28294 - RNA, 68 nt, synthetic construct
  source 1..68: mol_type = other RNA
tgaatggggtcccccgactctggctttcccccaggtgtacatgttcctggtgaaatggcaggatctgt

SEQ ID NO: 28295 - RNA, 68 nt, synthetic construct
  source 1..68: mol_type = other RNA
tgaatggggtcccccgactctggctttcccccaggtatacatgttcctggtgaaatggcaggacctgt

SEQ ID NO: 28296 - RNA, 68 nt, synthetic construct
  source 1..68: mol_type = other RNA
tgaatggggtcccccgactctggctttcccccaggtttacatgttcctggtgaaatggcaggacctgt

SEQ ID NO: 28297 - RNA, 69 nt, synthetic construct
  source 1..69: mol_type = other RNA
ctgaatggggtcccccgactctggctttcccccaggtgtacatgttcctggtgaaatggcaggacctgt

SEQ ID NO: 28298 - RNA, 69 nt, synthetic construct
  source 1..69: mol_type = other RNA
ctgaatggggtcccccgactctggctttcccccaggtatacatgttcctggtgaaatggcaggatctgt

SEQ ID NO: 28299 - RNA, 69 nt, synthetic construct
  source 1..69: mol_type = other RNA
ctgaatggggtcccccgactctggctttcccccaggtctacatgttcctggtgaaatggcaggacctgt

SEQ ID NO: 28300 - RNA, 69 nt, synthetic construct
  source 1..69: mol_type = other RNA
ctgaatggggtcccccgactctggctttcccccaggtctacatgttcctggtgaaatggcaggatctgt

SEQ ID NO: 28301 - RNA, 69 nt, synthetic construct
  source 1..69: mol_type = other RNA
ctgaatggggtcccccgactctggctttcccccaggtgtacatgttcctggtgaaatggcaggatctgt

SEQ ID NO: 28302 - RNA, 69 nt, synthetic construct
  source 1..69: mol_type = other RNA
ctgaatggggtcccccgactctggctttcccccaggtttacatgttcctggtgaaatggcaggacctgt

SEQ ID NO: 28303 - RNA, 69 nt, synthetic construct
  source 1..69: mol_type = other RNA
ctgaatggggtcccccgactctggctttcccccaggtttacatgttcctggtgaaatggcaggatctgt

SEQ ID NO: 28304 - RNA, 69 nt, synthetic construct
  source 1..69: mol_type = other RNA
ctgaatggggtcccccgactctggctttcccccaggtatacatgttcctggtgaaatggcaggacctgt

SEQ ID NO: 28305 - RNA, 70 nt, synthetic construct
  source 1..70: mol_type = other RNA
gctgaatggggtcccccgactctggctttcccccaggtatacatgttcctggtgaaatggcaggacctgt

SEQ ID NO: 28306 - RNA, 70 nt, synthetic construct
  source 1..70: mol_type = other RNA
gctgaatggggtcccccgactctggctttcccccaggtttacatgttcctggtgaaatggcaggatctgt

SEQ ID NO: 28307 - RNA, 70 nt, synthetic construct
  source 1..70: mol_type = other RNA
gctgaatggggtcccccgactctggctttcccccaggtttacatgttcctggtgaaatggcaggacctgt

SEQ ID NO: 28308 - RNA, 70 nt, synthetic construct
  source 1..70: mol_type = other RNA
gctgaatggggtcccccgactctggctttcccccaggtgtacatgttcctggtgaaatggcaggacctgt

SEQ ID NO: 28309 - RNA, 70 nt, synthetic construct
  source 1..70: mol_type = other RNA
gctgaatggggtcccccgactctggctttcccccaggtgtacatgttcctggtgaaatggcaggatctgt

SEQ ID NO: 28310 - RNA, 70 nt, synthetic construct
  source 1..70: mol_type = other RNA
gctgaatggggtcccccgactctggctttcccccaggtctacatgttcctggtgaaatggcaggacctgt

SEQ ID NO: 28311 - RNA, 70 nt, synthetic construct
  source 1..70: mol_type = other RNA
gctgaatggggtcccccgactctggctttcccccaggtatacatgttcctggtgaaatggcaggatctgt

SEQ ID NO: 28312 - RNA, 70 nt, synthetic construct
  source 1..70: mol_type = other RNA
gctgaatggggtcccccgactctggctttcccccaggtctacatgttcctggtgaaatggcaggatctgt

SEQ ID NO: 28313 - RNA, 71 nt, synthetic construct
  source 1..71: mol_type = other RNA
ggctgaatggggtcccccgactctggctttcccccaggtgtacatgttcctggtgaaatggcaggatctgt

SEQ ID NO: 28314 - RNA, 71 nt, synthetic construct
  source 1..71: mol_type = other RNA
ggctgaatggggtcccccgactctggctttcccccaggtttacatgttcctggtgaaatggcaggatctgt

SEQ ID NO: 28315 - RNA, 71 nt, synthetic construct
  source 1..71: mol_type = other RNA
ggctgaatggggtcccccgactctggctttcccccaggtttacatgttcctggtgaaatggcaggacctgt

SEQ ID NO: 28316 - RNA, 71 nt, synthetic construct
  source 1..71: mol_type = other RNA
ggctgaatggggtcccccgactctggctttcccccaggtgtacatgttcctggtgaaatggcaggacctgt

SEQ ID NO: 28317 - RNA, 71 nt, synthetic construct
  source 1..71: mol_type = other RNA
ggctgaatggggtcccccgactctggctttcccccaggtctacatgttcctggtgaaatggcaggacctgt

SEQ ID NO: 28318 - RNA, 71 nt, synthetic construct
  source 1..71: mol_type = other RNA
ggctgaatggggtcccccgactctggctttcccccaggtatacatgttcctggtgaaatggcaggacctgt

SEQ ID NO: 28319 - RNA, 71 nt, synthetic construct
  source 1..71: mol_type = other RNA
ggctgaatggggtcccccgactctggctttcccccaggtctacatgttcctggtgaaatggcaggatctgt

SEQ ID NO: 28320 - RNA, 71 nt, synthetic construct
  source 1..71: mol_type = other RNA
ggctgaatggggtcccccgactctggctttcccccaggtatacatgttcctggtgaaatggcaggatctgt

SEQ ID NO: 28321 - RNA, 72 nt, synthetic construct
  source 1..72: mol_type = other RNA
aggctgaatggggtcccccgactctggctttcccccaggtgtacatgttcctggtgaaatggcaggatctgt

SEQ ID NO: 28322 - RNA, 72 nt, synthetic construct
  source 1..72: mol_type = other RNA
aggctgaatggggtcccccgactctggctttcccccaggtttacatgttcctggtgaaatggcaggacctgt

SEQ ID NO: 28323 - RNA, 72 nt, synthetic construct
  source 1..72: mol_type = other RNA
aggctgaatggggtcccccgactctggctttcccccaggtttacatgttcctggtgaaatggcaggatctgt

SEQ ID NO: 28324 - RNA, 72 nt, synthetic construct
  source 1..72: mol_type = other RNA
aggctgaatggggtcccccgactctggctttcccccaggtatacatgttcctggtgaaatggcaggatctgt

SEQ ID NO: 28325 - RNA, 72 nt, synthetic construct
  source 1..72: mol_type = other RNA
aggctgaatggggtcccccgactctggctttcccccaggtctacatgttcctggtgaaatggcaggatctgt

SEQ ID NO: 28326 - RNA, 72 nt, synthetic construct
  source 1..72: mol_type = other RNA
aggctgaatggggtcccccgactctggctttcccccaggtctacatgttcctggtgaaatggcaggacctgt

SEQ ID NO: 28327 - RNA, 72 nt, synthetic construct
  source 1..72: mol_type = other RNA
aggctgaatggggtcccccgactctggctttcccccaggtatacatgttcctggtgaaatggcaggacctgt

SEQ ID NO: 28328 - RNA, 72 nt, synthetic construct
  source 1..72: mol_type = other RNA
aggctgaatggggtcccccgactctggctttcccccaggtgtacatgttcctggtgaaatggcaggacctgt

SEQ ID NO: 28329 - RNA, 73 nt, synthetic construct
  source 1..73: mol_type = other RNA
gaggctgaatggggtcccccgactctggctttcccccaggtatacatgttcctggtgaaatggcaggacctgt

SEQ ID NO: 28330 - RNA, 73 nt, synthetic construct
  source 1..73: mol_type = other RNA
gaggctgaatggggtcccccgactctggctttcccccaggtttacatgttcctggtgaaatggcaggacctgt

SEQ ID NO: 28331 - RNA, 73 nt, synthetic construct
  source 1..73: mol_type = other RNA
gaggctgaatggggtcccccgactctggctttcccccaggtgtacatgttcctggtgaaatggcaggacctgt

SEQ ID NO: 28332 - RNA, 73 nt, synthetic construct
  source 1..73: mol_type = other RNA
gaggctgaatggggtcccccgactctggctttcccccaggtgtacatgttcctggtgaaatggcaggatctgt

SEQ ID NO: 28333 - RNA, 73 nt, synthetic construct
  source 1..73: mol_type = other RNA
gaggctgaatggggtcccccgactctggctttcccccaggtctacatgttcctggtgaaatggcaggatctgt

SEQ ID NO: 28334 - RNA, 73 nt, synthetic construct
  source 1..73: mol_type = other RNA
gaggctgaatggggtcccccgactctggctttcccccaggtatacatgttcctggtgaaatggcaggatctgt

SEQ ID NO: 28335 - RNA, 73 nt, synthetic construct
  source 1..73: mol_type = other RNA
gaggctgaatggggtcccccgactctggctttcccccaggtttacatgttcctggtgaaatggcaggatctgt

SEQ ID NO: 28336 - RNA, 73 nt, synthetic construct
  source 1..73: mol_type = other RNA
gaggctgaatggggtcccccgactctggctttcccccaggtctacatgttcctggtgaaatggcaggacctgt

SEQ ID NO: 28337 - RNA, 74 nt, synthetic construct
  source 1..74: mol_type = other RNA
ggaggctgaatggggtcccccgactctggctttcccccaggtctacatgttcctggtgaaatggcaggatctgt

SEQ ID NO: 28338 - RNA, 74 nt, synthetic construct
  source 1..74: mol_type = other RNA
ggaggctgaatggggtcccccgactctggctttcccccaggtttacatgttcctggtgaaatggcaggatctgt

SEQ ID NO: 28339 - RNA, 74 nt, synthetic construct
  source 1..74: mol_type = other RNA
ggaggctgaatggggtcccccgactctggctttcccccaggtttacatgttcctggtgaaatggcaggacctgt

SEQ ID NO: 28340 - RNA, 74 nt, synthetic construct
  source 1..74: mol_type = other RNA
ggaggctgaatggggtcccccgactctggctttcccccaggtgtacatgttcctggtgaaatggcaggatctgt

SEQ ID NO: 28341 - RNA, 74 nt, synthetic construct
  source 1..74: mol_type = other RNA
ggaggctgaatggggtcccccgactctggctttcccccaggtgtacatgttcctggtgaaatggcaggacctgt

SEQ ID NO: 28342 - RNA, 74 nt, synthetic construct
  source 1..74: mol_type = other RNA
ggaggctgaatggggtcccccgactctggctttcccccaggtatacatgttcctggtgaaatggcaggatctgt

SEQ ID NO: 28343 - RNA, 74 nt, synthetic construct
  source 1..74: mol_type = other RNA
ggaggctgaatggggtcccccgactctggctttcccccaggtctacatgttcctggtgaaatggcaggacctgt

SEQ ID NO: 28344 - RNA, 74 nt, synthetic construct
  source 1..74: mol_type = other RNA
ggaggctgaatggggtcccccgactctggctttcccccaggtatacatgttcctggtgaaatggcaggacctgt

SEQ ID NO: 28345 - RNA, 75 nt, synthetic construct
  source 1..75: mol_type = other RNA
tggaggctgaatggggtcccccgactctggctttcccccaggtttacatgttcctggtgaaatggcaggatctgt

SEQ ID NO: 28346 - RNA, 75 nt, synthetic construct
  source 1..75: mol_type = other RNA
tggaggctgaatggggtcccccgactctggctttcccccaggtatacatgttcctggtgaaatggcaggatctgt

SEQ ID NO: 28347 - RNA, 75 nt, synthetic construct
  source 1..75: mol_type = other RNA
tggaggctgaatggggtcccccgactctggctttcccccaggtgtacatgttcctggtgaaatggcaggatctgt

SEQ ID NO: 28348 - RNA, 75 nt, synthetic construct
  source 1..75: mol_type = other RNA
tggaggctgaatggggtcccccgactctggctttcccccaggtgtacatgttcctggtgaaatggcaggacctgt

SEQ ID NO: 28349 - RNA, 75 nt, synthetic construct
  source 1..75: mol_type = other RNA
tggaggctgaatggggtcccccgactctggctttcccccaggtctacatgttcctggtgaaatggcaggatctgt

SEQ ID NO: 28350 - RNA, 75 nt, synthetic construct
  source 1..75: mol_type = other RNA
tggaggctgaatggggtcccccgactctggctttcccccaggtctacatgttcctggtgaaatggcaggacctgt

SEQ ID NO: 28351 - RNA, 75 nt, synthetic construct
  source 1..75: mol_type = other RNA
tggaggctgaatggggtcccccgactctggctttcccccaggtatacatgttcctggtgaaatggcaggacctgt

SEQ ID NO: 28352 - RNA, 75 nt, synthetic construct
  source 1..75: mol_type = other RNA
tggaggctgaatggggtcccccgactctggctttcccccaggtttacatgttcctggtgaaatggcaggacctgt

SEQ ID NO: 28353 - RNA, 76 nt, synthetic construct
  source 1..76: mol_type = other RNA
ttggaggctgaatggggtcccccgactctggctttcccccaggtatacatgttcctggtgaaatggcaggatctgt

SEQ ID NO: 28354 - RNA, 76 nt, synthetic construct
  source 1..76: mol_type = other RNA
ttggaggctgaatggggtcccccgactctggctttcccccaggtgtacatgttcctggtgaaatggcaggatctgt

SEQ ID NO: 28355 - RNA, 76 nt, synthetic construct
  source 1..76: mol_type = other RNA
ttggaggctgaatggggtcccccgactctggctttcccccaggtgtacatgttcctggtgaaatggcaggacctgt

SEQ ID NO: 28356 - RNA, 76 nt, synthetic construct
  source 1..76: mol_type = other RNA
ttggaggctgaatggggtcccccgactctggctttcccccaggtatacatgttcctggtgaaatggcaggacctgt

SEQ ID NO: 28357 - RNA, 76 nt, synthetic construct
  source 1..76: mol_type = other RNA
ttggaggctgaatggggtcccccgactctggctttcccccaggtctacatgttcctggtgaaatggcaggacctgt

SEQ ID NO: 28358 - RNA, 76 nt, synthetic construct
  source 1..76: mol_type = other RNA
ttggaggctgaatggggtcccccgactctggctttcccccaggtctacatgttcctggtgaaatggcaggatctgt

SEQ ID NO: 28359 - RNA, 76 nt, synthetic construct
  source 1..76: mol_type = other RNA
ttggaggctgaatggggtcccccgactctggctttcccccaggtttacatgttcctggtgaaatggcaggacctgt

SEQ ID NO: 28360 - RNA, 76 nt, synthetic construct
  source 1..76: mol_type = other RNA
ttggaggctgaatggggtcccccgactctggctttcccccaggtttacatgttcctggtgaaatggcaggatctgt

SEQ ID NO: 28361 - RNA, 77 nt, synthetic construct
  source 1..77: mol_type = other RNA
tttggaggctgaatggggtcccccgactctggctttcccccaggtatacatgttcctggtgaaatggcaggatctgt

SEQ ID NO: 28362 - RNA, 77 nt, synthetic construct
  source 1..77: mol_type = other RNA
tttggaggctgaatggggtcccccgactctggctttcccccaggtttacatgttcctggtgaaatggcaggacctgt

SEQ ID NO: 28363 - RNA, 77 nt, synthetic construct
  source 1..77: mol_type = other RNA
tttggaggctgaatggggtcccccgactctggctttcccccaggtttacatgttcctggtgaaatggcaggatctgt

SEQ ID NO: 28364 - RNA, 77 nt, synthetic construct
  source 1..77: mol_type = other RNA
tttggaggctgaatggggtcccccgactctggctttcccccaggtatacatgttcctggtgaaatggcaggacctgt

SEQ ID NO: 28365 - RNA, 77 nt, synthetic construct
  source 1..77: mol_type = other RNA
tttggaggctgaatggggtcccccgactctggctttcccccaggtgtacatgttcctggtgaaatggcaggatctgt

SEQ ID NO: 28366 - RNA, 77 nt, synthetic construct
  source 1..77: mol_type = other RNA
tttggaggctgaatggggtcccccgactctggctttcccccaggtctacatgttcctggtgaaatggcaggacctgt

SEQ ID NO: 28367 - RNA, 77 nt, synthetic construct
  source 1..77: mol_type = other RNA
tttggaggctgaatggggtcccccgactctggctttcccccaggtgtacatgttcctggtgaaatggcaggacctgt

SEQ ID NO: 28368 - RNA, 77 nt, synthetic construct
  source 1..77: mol_type = other RNA
tttggaggctgaatggggtcccccgactctggctttcccccaggtctacatgttcctggtgaaatggcaggatctgt

SEQ ID NO: 28369 - RNA, 78 nt, synthetic construct
  source 1..78: mol_type = other RNA
ctttggaggctgaatggggtcccccgactctggctttcccccaggtatacatgttcctggtgaaatggcaggacctgt

SEQ ID NO: 28370 - RNA, 78 nt, synthetic construct
  source 1..78: mol_type = other RNA
ctttggaggctgaatggggtcccccgactctggctttcccccaggtttacatgttcctggtgaaatggcaggacctgt

SEQ ID NO: 28371 - RNA, 78 nt, synthetic construct
  source 1..78: mol_type = other RNA
ctttggaggctgaatggggtcccccgactctggctttcccccaggtttacatgttcctggtgaaatggcaggatctgt

SEQ ID NO: 28372 - RNA, 78 nt, synthetic construct
  source 1..78: mol_type = other RNA
ctttggaggctgaatggggtcccccgactctggctttcccccaggtgtacatgttcctggtgaaatggcaggatctgt

SEQ ID NO: 28373 - RNA, 78 nt, synthetic construct
  source 1..78: mol_type = other RNA
ctttggaggctgaatggggtcccccgactctggctttcccccaggtctacatgttcctggtgaaatggcaggatctgt

SEQ ID NO: 28374 - RNA, 78 nt, synthetic construct
  source 1..78: mol_type = other RNA
ctttggaggctgaatggggtcccccgactctggctttcccccaggtctacatgttcctggtgaaatggcaggacctgt

SEQ ID NO: 28375 - RNA, 78 nt, synthetic construct
  source 1..78: mol_type = other RNA
ctttggaggctgaatggggtcccccgactctggctttcccccaggtatacatgttcctggtgaaatggcaggatctgt

SEQ ID NO: 28376 - RNA, 78 nt, synthetic construct
  source 1..78: mol_type = other RNA
ctttggaggctgaatggggtcccccgactctggctttcccccaggtgtacatgttcctggtgaaatggcaggacctgt

SEQ ID NO: 28377 - RNA, 79 nt, synthetic construct
  source 1..79: mol_type = other RNA
tctttggaggctgaatggggtcccccgactctggctttcccccaggtttacatgttcctggtgaaatggcaggatctgt

SEQ ID NO: 28378 - RNA, 79 nt, synthetic construct
  source 1..79: mol_type = other RNA
tctttggaggctgaatggggtcccccgactctggctttcccccaggtttacatgttcctggtgaaatggcaggacctgt

SEQ ID NO: 28379 - RNA, 79 nt, synthetic construct
  source 1..79: mol_type = other RNA
tctttggaggctgaatggggtcccccgactctggctttcccccaggtgtacatgttcctggtgaaatggcaggacctgt

SEQ ID NO: 28380 - RNA, 79 nt, synthetic construct
  source 1..79: mol_type = other RNA
tctttggaggctgaatggggtcccccgactctggctttcccccaggtatacatgttcctggtgaaatggcaggatctgt

SEQ ID NO: 28381 - RNA, 79 nt, synthetic construct
  source 1..79: mol_type = other RNA
tctttggaggctgaatggggtcccccgactctggctttcccccaggtctacatgttcctggtgaaatggcaggacctgt

SEQ ID NO: 28382 - RNA, 79 nt, synthetic construct
  source 1..79: mol_type = other RNA
tctttggaggctgaatggggtcccccgactctggctttcccccaggtctacatgttcctggtgaaatggcaggatctgt

SEQ ID NO: 28383 - RNA, 79 nt, synthetic construct
  source 1..79: mol_type = other RNA
tctttggaggctgaatggggtcccccgactctggctttcccccaggtgtacatgttcctggtgaaatggcaggatctgt

SEQ ID NO: 28384 - RNA, 79 nt, synthetic construct
  source 1..79: mol_type = other RNA
tctttggaggctgaatggggtcccccgactctggctttcccccaggtatacatgttcctggtgaaatggcaggacctgt

SEQ ID NO: 28385 - RNA, 80 nt, synthetic construct
  source 1..80: mol_type = other RNA
ctctttggaggctgaatggggtcccccgactctggctttcccccaggtatacatgttcctggtgaaatggcaggatctgt

SEQ ID NO: 28386 - RNA, 80 nt, synthetic construct
  source 1..80: mol_type = other RNA
ctctttggaggctgaatggggtcccccgactctggctttcccccaggtttacatgttcctggtgaaatggcaggacctgt

SEQ ID NO: 28387 - RNA, 80 nt, synthetic construct
  source 1..80: mol_type = other RNA
ctctttggaggctgaatggggtcccccgactctggctttcccccaggtgtacatgttcctggtgaaatggcaggatctgt

SEQ ID NO: 28388 - RNA, 80 nt, synthetic construct
  source 1..80: mol_type = other RNA
ctctttggaggctgaatggggtcccccgactctggctttcccccaggtctacatgttcctggtgaaatggcaggatctgt

SEQ ID NO: 28389 - RNA, 80 nt, synthetic construct
  source 1..80: mol_type = other RNA
ctctttggaggctgaatggggtcccccgactctggctttcccccaggtgtacatgttcctggtgaaatggcaggacctgt

SEQ ID NO: 28390 - RNA, 80 nt, synthetic construct
  source 1..80: mol_type = other RNA
ctctttggaggctgaatggggtcccccgactctggctttcccccaggtctacatgttcctggtgaaatggcaggacctgt

SEQ ID NO: 28391 - RNA, 80 nt, synthetic construct
  source 1..80: mol_type = other RNA
ctctttggaggctgaatggggtcccccgactctggctttcccccaggtttacatgttcctggtgaaatggcaggatctgt

SEQ ID NO: 28392 - RNA, 80 nt, synthetic construct
  source 1..80: mol_type = other RNA
ctctttggaggctgaatggggtcccccgactctggctttcccccaggtatacatgttcctggtgaaatggcaggacctgt

SEQ ID NO: 28393 - RNA, 81 nt, synthetic construct
  source 1..81: mol_type = other RNA
cctctttggaggctgaatggggtcccccgactctggctttcccccaggtttacatgttcctggtgaaatggcaggatctgt

SEQ ID NO: 28394 - RNA, 81 nt, synthetic construct
  source 1..81: mol_type = other RNA
cctctttggaggctgaatggggtcccccgactctggctttcccccaggtgtacatgttcctggtgaaatggcaggatctgt

SEQ ID NO: 28395 - RNA, 81 nt, synthetic construct
  source 1..81: mol_type = other RNA
cctctttggaggctgaatggggtcccccgactctggctttcccccaggtttacatgttcctggtgaaatggcaggacctgt

SEQ ID NO: 28396 - RNA, 81 nt, synthetic construct
  source 1..81: mol_type = other RNA
cctctttggaggctgaatggggtcccccgactctggctttcccccaggtctacatgttcctggtgaaatggcaggatctgt

SEQ ID NO: 28397 - RNA, 81 nt, synthetic construct
  source 1..81: mol_type = other RNA
cctctttggaggctgaatggggtcccccgactctggctttcccccaggtctacatgttcctggtgaaatggcaggacctgt

SEQ ID NO: 28398 - RNA, 81 nt, synthetic construct
  source 1..81: mol_type = other RNA
cctctttggaggctgaatggggtcccccgactctggctttcccccaggtatacatgttcctggtgaaatggcaggatctgt

SEQ ID NO: 28399 - RNA, 81 nt, synthetic construct
  source 1..81: mol_type = other RNA
cctctttggaggctgaatggggtcccccgactctggctttcccccaggtgtacatgttcctggtgaaatggcaggacctgt

SEQ ID NO: 28400 - RNA, 81 nt, synthetic construct
  source 1..81: mol_type = other RNA
cctctttggaggctgaatggggtcccccgactctggctttcccccaggtatacatgttcctggtgaaatggcaggacctgt

SEQ ID NO: 28401 - RNA, 82 nt, synthetic construct
  source 1..82: mol_type = other RNA
gcctctttggaggctgaatggggtcccccgactctggctttcccccaggtctacatgttcctggtgaaatggcaggacctgt

SEQ ID NO: 28402 - RNA, 82 nt, synthetic construct
  source 1..82: mol_type = other RNA
gcctctttggaggctgaatggggtcccccgactctggctttcccccaggtatacatgttcctggtgaaatggcaggacctgt

SEQ ID NO: 28403 - RNA, 82 nt, synthetic construct
  source 1..82: mol_type = other RNA
gcctctttggaggctgaatggggtcccccgactctggctttcccccaggtctacatgttcctggtgaaatggcaggatctgt

SEQ ID NO: 28404 - RNA, 82 nt, synthetic construct
  source 1..82: mol_type = other RNA
gcctctttggaggctgaatggggtcccccgactctggctttcccccaggtgtacatgttcctggtgaaatggcaggatctgt

SEQ ID NO: 28405 - RNA, 82 nt, synthetic construct
  source 1..82: mol_type = other RNA
gcctctttggaggctgaatggggtcccccgactctggctttcccccaggtatacatgttcctggtgaaatggcaggatctgt

SEQ ID NO: 28406 - RNA, 82 nt, synthetic construct
  source 1..82: mol_type = other RNA
gcctctttggaggctgaatggggtcccccgactctggctttcccccaggtgtacatgttcctggtgaaatggcaggacctgt

SEQ ID NO: 28407 - RNA, 82 nt, synthetic construct
  source 1..82: mol_type = other RNA
gcctctttggaggctgaatggggtcccccgactctggctttcccccaggtttacatgttcctggtgaaatggcaggatctgt

SEQ ID NO: 28408 - RNA, 82 nt, synthetic construct
  source 1..82: mol_type = other RNA
gcctctttggaggctgaatggggtcccccgactctggctttcccccaggtttacatgttcctggtgaaatggcaggacctgt

SEQ ID NO: 28409 - RNA, 83 nt, synthetic construct
  source 1..83: mol_type = other RNA
agcctctttggaggctgaatggggtcccccgactctggctttcccccaggtatacatgttcctggtgaaatggcaggatctgt

SEQ ID NO: 28410 - RNA, 83 nt, synthetic construct
  source 1..83: mol_type = other RNA
agcctctttggaggctgaatggggtcccccgactctggctttcccccaggtctacatgttcctggtgaaatggcaggacctgt

SEQ ID NO: 28411 - RNA, 83 nt, synthetic construct
  source 1..83: mol_type = other RNA
agcctctttggaggctgaatggggtcccccgactctggctttcccccaggtttacatgttcctggtgaaatggcaggatctgt

SEQ ID NO: 28412 - RNA, 83 nt, synthetic construct
  source 1..83: mol_type = other RNA
agcctctttggaggctgaatggggtcccccgactctggctttcccccaggtgtacatgttcctggtgaaatggcaggatctgt

SEQ ID NO: 28413 - RNA, 83 nt, synthetic construct
  source 1..83: mol_type = other RNA
agcctctttggaggctgaatggggtcccccgactctggctttcccccaggtttacatgttcctggtgaaatggcaggacctgt

SEQ ID NO: 28414 - RNA, 83 nt, synthetic construct
  source 1..83: mol_type = other RNA
agcctctttggaggctgaatggggtcccccgactctggctttcccccaggtgtacatgttcctggtgaaatggcaggacctgt

SEQ ID NO: 28415 - RNA, 83 nt, synthetic construct
  source 1..83: mol_type = other RNA
agcctctttggaggctgaatggggtcccccgactctggctttcccccaggtatacatgttcctggtgaaatggcaggacctgt

SEQ ID NO: 28416 - RNA, 83 nt, synthetic construct
  source 1..83: mol_type = other RNA
agcctctttggaggctgaatggggtcccccgactctggctttcccccaggtctacatgttcctggtgaaatggcaggatctgt

SEQ ID NO: 28417 - RNA, 84 nt, synthetic construct
  source 1..84: mol_type = other RNA
aagcctctttggaggctgaatggggtcccccgactctggctttcccccaggtttacatgttcctggtgaaatggcaggatctgt

SEQ ID NO: 28418 - RNA, 84 nt, synthetic construct
  source 1..84: mol_type = other RNA
aagcctctttggaggctgaatggggtcccccgactctggctttcccccaggtatacatgttcctggtgaaatggcaggacctgt

SEQ ID NO: 28419 - RNA, 84 nt, synthetic construct
  source 1..84: mol_type = other RNA
aagcctctttggaggctgaatggggtcccccgactctggctttcccccaggtatacatgttcctggtgaaatggcaggatctgt

SEQ ID NO: 28420 - RNA, 84 nt, synthetic construct
  source 1..84: mol_type = other RNA
aagcctctttggaggctgaatggggtcccccgactctggctttcccccaggtctacatgttcctggtgaaatggcaggacctgt

SEQ ID NO: 28421 - RNA, 84 nt, synthetic construct
  source 1..84: mol_type = other RNA
aagcctctttggaggctgaatggggtcccccgactctggctttcccccaggtctacatgttcctggtgaaatggcaggatctgt

SEQ ID NO: 28422 - RNA, 84 nt, synthetic construct
  source 1..84: mol_type = other RNA
aagcctctttggaggctgaatggggtcccccgactctggctttcccccaggtgtacatgttcctggtgaaatggcaggacctgt

SEQ ID NO: 28423 - RNA, 84 nt, synthetic construct
  source 1..84: mol_type = other RNA
aagcctctttggaggctgaatggggtcccccgactctggctttcccccaggtttacatgttcctggtgaaatggcaggacctgt

SEQ ID NO: 28424 - RNA, 84 nt, synthetic construct
  source 1..84: mol_type = other RNA
aagcctctttggaggctgaatggggtcccccgactctggctttcccccaggtgtacatgttcctggtgaaatggcaggatctgt

SEQ ID NO: 28425 - RNA, 85 nt, synthetic construct
  source 1..85: mol_type = other RNA
aaagcctctttggaggctgaatggggtcccccgactctggctttcccccaggtatacatgttcctggtgaaatggcaggacctgt

SEQ ID NO: 28426 - RNA, 85 nt, synthetic construct
  source 1..85: mol_type = other RNA
aaagcctctttggaggctgaatggggtcccccgactctggctttcccccaggtatacatgttcctggtgaaatggcaggatctgt

SEQ ID NO: 28427 - RNA, 85 nt, synthetic construct
  source 1..85: mol_type = other RNA
aaagcctctttggaggctgaatggggtcccccgactctggctttcccccaggtttacatgttcctggtgaaatggcaggatctgt

SEQ ID NO: 28428 - RNA, 85 nt, synthetic construct
  source 1..85: mol_type = other RNA
aaagcctctttggaggctgaatggggtcccccgactctggctttcccccaggtctacatgttcctggtgaaatggcaggatctgt

SEQ ID NO: 28429 - RNA, 85 nt, synthetic construct
  source 1..85: mol_type = other RNA
aaagcctctttggaggctgaatggggtcccccgactctggctttcccccaggtctacatgttcctggtgaaatggcaggacctgt

SEQ ID NO: 28430 - RNA, 85 nt, synthetic construct
  source 1..85: mol_type = other RNA
aaagcctctttggaggctgaatggggtcccccgactctggctttcccccaggtgtacatgttcctggtgaaatggcaggatctgt

SEQ ID NO: 28431 - RNA, 85 nt, synthetic construct
  source 1..85: mol_type = other RNA
aaagcctctttggaggctgaatggggtcccccgactctggctttcccccaggtttacatgttcctggtgaaatggcaggacctgt

SEQ ID NO: 28432 - RNA, 85 nt, synthetic construct
  source 1..85: mol_type = other RNA
aaagcctctttggaggctgaatggggtcccccgactctggctttcccccaggtgtacatgttcctggtgaaatggcaggacctgt

SEQ ID NO: 28433 - RNA, 86 nt, synthetic construct
  source 1..86: mol_type = other RNA
caaagcctctttggaggctgaatggggtcccccgactctggctttcccccaggtatacatgttcctggtgaaatggcaggacctgt

SEQ ID NO: 28434 - RNA, 86 nt, synthetic construct
  source 1..86: mol_type = other RNA
caaagcctctttggaggctgaatggggtcccccgactctggctttcccccaggtgtacatgttcctggtgaaatggcaggacctgt

SEQ ID NO: 28435 - RNA, 86 nt, synthetic construct
  source 1..86: mol_type = other RNA
caaagcctctttggaggctgaatggggtcccccgactctggctttcccccaggtctacatgttcctggtgaaatggcaggacctgt

SEQ ID NO: 28436 - RNA, 86 nt, synthetic construct
  source 1..86: mol_type = other RNA
caaagcctctttggaggctgaatggggtcccccgactctggctttcccccaggtctacatgttcctggtgaaatggcaggatctgt

SEQ ID NO: 28437 - RNA, 86 nt, synthetic construct
  source 1..86: mol_type = other RNA
caaagcctctttggaggctgaatggggtcccccgactctggctttcccccaggtatacatgttcctggtgaaatggcaggatctgt

SEQ ID NO: 28438 - RNA, 86 nt, synthetic construct
  source 1..86: mol_type = other RNA
caaagcctctttggaggctgaatggggtcccccgactctggctttcccccaggtgtacatgttcctggtgaaatggcaggatctgt

SEQ ID NO: 28439 - RNA, 86 nt, synthetic construct
  source 1..86: mol_type = other RNA
caaagcctctttggaggctgaatggggtcccccgactctggctttcccccaggtttacatgttcctggtgaaatggcaggacctgt

SEQ ID NO: 28440 - RNA, 86 nt, synthetic construct
  source 1..86: mol_type = other RNA
caaagcctctttggaggctgaatggggtcccccgactctggctttcccccaggtttacatgttcctggtgaaatggcaggatctgt

SEQ ID NO: 28441 - RNA, 87 nt, synthetic construct
  source 1..87: mol_type = other RNA
gcaaagcctctttggaggctgaatggggtcccccgactctggctttcccccaggtctacatgttcctggtgaaatggcaggatctgt

SEQ ID NO: 28442 - RNA, 87 nt, synthetic construct
  source 1..87: mol_type = other RNA
gcaaagcctctttggaggctgaatggggtcccccgactctggctttcccccaggtgtacatgttcctggtgaaatggcaggacctgt

SEQ ID NO: 28443 - RNA, 87 nt, synthetic construct
  source 1..87: mol_type = other RNA
gcaaagcctctttggaggctgaatggggtcccccgactctggctttcccccaggtgtacatgttcctggtgaaatggcaggatctgt

SEQ ID NO: 28444 - RNA, 87 nt, synthetic construct
  source 1..87: mol_type = other RNA
gcaaagcctctttggaggctgaatggggtcccccgactctggctttcccccaggtttacatgttcctggtgaaatggcaggacctgt

SEQ ID NO: 28445 - RNA, 87 nt, synthetic construct
  source 1..87: mol_type = other RNA
gcaaagcctctttggaggctgaatggggtcccccgactctggctttcccccaggtttacatgttcctggtgaaatggcaggatctgt

SEQ ID NO: 28446 - RNA, 87 nt, synthetic construct
  source 1..87: mol_type = other RNA
gcaaagcctctttggaggctgaatggggtcccccgactctggctttcccccaggtctacatgttcctggtgaaatggcaggacctgt

SEQ ID NO: 28447 - RNA, 87 nt, synthetic construct
  source 1..87: mol_type = other RNA
gcaaagcctctttggaggctgaatggggtcccccgactctggctttcccccaggtatacatgttcctggtgaaatggcaggatctgt

SEQ ID NO: 28448 - RNA, 87 nt, synthetic construct
  source 1..87: mol_type = other RNA
gcaaagcctctttggaggctgaatggggtcccccgactctggctttcccccaggtatacatgttcctggtgaaatggcaggacctgt

SEQ ID NO: 28449 - RNA, 88 nt, synthetic construct
  source 1..88: mol_type = other RNA
agcaaagcctctttggaggctgaatggggtcccccgactctggctttcccccaggtttacatgttcctggtgaaatggcaggacctgt

SEQ ID NO: 28450 - RNA, 88 nt, synthetic construct
  source 1..88: mol_type = other RNA
agcaaagcctctttggaggctgaatggggtcccccgactctggctttcccccaggtgtacatgttcctggtgaaatggcaggatctgt

SEQ ID NO: 28451 - RNA, 88 nt, synthetic construct
  source 1..88: mol_type = other RNA
agcaaagcctctttggaggctgaatggggtcccccgactctggctttcccccaggtgtacatgttcctggtgaaatggcaggacctgt

SEQ ID NO: 28452 - RNA, 88 nt, synthetic construct
  source 1..88: mol_type = other RNA
agcaaagcctctttggaggctgaatggggtcccccgactctggctttcccccaggtttacatgttcctggtgaaatggcaggatctgt

SEQ ID NO: 28453 - RNA, 88 nt, synthetic construct
  source 1..88: mol_type = other RNA
agcaaagcctctttggaggctgaatggggtcccccgactctggctttcccccaggtatacatgttcctggtgaaatggcaggatctgt

SEQ ID NO: 28454 - RNA, 88 nt, synthetic construct
  source 1..88: mol_type = other RNA
agcaaagcctctttggaggctgaatggggtcccccgactctggctttcccccaggtatacatgttcctggtgaaatggcaggacctgt

SEQ ID NO: 28455 - RNA, 88 nt, synthetic construct
  source 1..88: mol_type = other RNA
agcaaagcctctttggaggctgaatggggtcccccgactctggctttcccccaggtctacatgttcctggtgaaatggcaggacctgt

SEQ ID NO: 28456 - RNA, 88 nt, synthetic construct
  source 1..88: mol_type = other RNA
agcaaagcctctttggaggctgaatggggtcccccgactctggctttcccccaggtctacatgttcctggtgaaatggcaggatctgt

SEQ ID NO: 28457 - RNA, 89 nt, synthetic construct
  source 1..89: mol_type = other RNA
cagcaaagcctctttggaggctgaatggggtcccccgactctggctttcccccaggtctacatgttcctggtgaaatggcaggacctgt

SEQ ID NO: 28458 - RNA, 89 nt, synthetic construct
  source 1..89: mol_type = other RNA
cagcaaagcctctttggaggctgaatggggtcccccgactctggctttcccccaggtctacatgttcctggtgaaatggcaggatctgt

SEQ ID NO: 28459 - RNA, 89 nt, synthetic construct
  source 1..89: mol_type = other RNA
cagcaaagcctctttggaggctgaatggggtcccccgactctggctttcccccaggtgtacatgttcctggtgaaatggcaggacctgt

SEQ ID NO: 28460 - RNA, 89 nt, synthetic construct
  source 1..89: mol_type = other RNA
cagcaaagcctctttggaggctgaatggggtcccccgactctggctttcccccaggtgtacatgttcctggtgaaatggcaggatctgt

SEQ ID NO: 28461 - RNA, 89 nt, synthetic construct
  source 1..89: mol_type = other RNA
cagcaaagcctctttggaggctgaatggggtcccccgactctggctttcccccaggtttacatgttcctggtgaaatggcaggacctgt

SEQ ID NO: 28462 - RNA, 89 nt, synthetic construct
  source 1..89: mol_type = other RNA
cagcaaagcctctttggaggctgaatggggtcccccgactctggctttcccccaggtatacatgttcctggtgaaatggcaggacctgt

SEQ ID NO: 28463 - RNA, 89 nt, synthetic construct
  source 1..89: mol_type = other RNA
cagcaaagcctctttggaggctgaatggggtcccccgactctggctttcccccaggtatacatgttcctggtgaaatggcaggatctgt

SEQ ID NO: 28464 - RNA, 89 nt, synthetic construct
  source 1..89: mol_type = other RNA
cagcaaagcctctttggaggctgaatggggtcccccgactctggctttcccccaggtttacatgttcctggtgaaatggcaggatctgt

SEQ ID NO: 28465 - RNA, 90 nt, synthetic construct
  source 1..90: mol_type = other RNA
acagcaaagcctctttggaggctgaatggggtcccccgactctggctttcccccaggtttacatgttcctggtgaaatggcaggatctgt

SEQ ID NO: 28466 - RNA, 90 nt, synthetic construct
  source 1..90: mol_type = other RNA
acagcaaagcctctttggaggctgaatggggtcccccgactctggctttcccccaggtatacatgttcctggtgaaatggcaggacctgt

SEQ ID NO: 28467 - RNA, 90 nt, synthetic construct
  source 1..90: mol_type = other RNA
acagcaaagcctctttggaggctgaatggggtcccccgactctggctttcccccaggtctacatgttcctggtgaaatggcaggatctgt

SEQ ID NO: 28468 - RNA, 90 nt, synthetic construct
  source 1..90: mol_type = other RNA
acagcaaagcctctttggaggctgaatggggtcccccgactctggctttcccccaggtgtacatgttcctggtgaaatggcaggacctgt

SEQ ID NO: 28469 - RNA, 90 nt, synthetic construct
  source 1..90: mol_type = other RNA
acagcaaagcctctttggaggctgaatggggtcccccgactctggctttcccccaggtctacatgttcctggtgaaatggcaggacctgt

SEQ ID NO: 28470 - RNA, 90 nt, synthetic construct
  source 1..90: mol_type = other RNA
acagcaaagcctctttggaggctgaatggggtcccccgactctggctttcccccaggtatacatgttcctggtgaaatggcaggatctgt

SEQ ID NO: 28471 - RNA, 90 nt, synthetic construct
  source 1..90: mol_type = other RNA
acagcaaagcctctttggaggctgaatggggtcccccgactctggctttcccccaggtttacatgttcctggtgaaatggcaggacctgt

SEQ ID NO: 28472 - RNA, 90 nt, synthetic construct
  source 1..90: mol_type = other RNA
acagcaaagcctctttggaggctgaatggggtcccccgactctggctttcccccaggtgtacatgttcctggtgaaatggcaggatctgt

SEQ ID NO: 28473 - RNA, 91 nt, synthetic construct
  source 1..91: mol_type = other RNA
cacagcaaagcctctttggaggctgaatggggtcccccgactctggctttcccccaggtctacatgttcctggtgaaatggcaggacctgt

SEQ ID NO: 28474 - RNA, 91 nt, synthetic construct
  source 1..91: mol_type = other RNA
cacagcaaagcctctttggaggctgaatggggtcccccgactctggctttcccccaggtgtacatgttcctggtgaaatggcaggacctgt

SEQ ID NO: 28475 - RNA, 91 nt, synthetic construct
  source 1..91: mol_type = other RNA
cacagcaaagcctctttggaggctgaatggggtcccccgactctggctttcccccaggtctacatgttcctggtgaaatggcaggatctgt

SEQ ID NO: 28476 - RNA, 91 nt, synthetic construct
  source 1..91: mol_type = other RNA
cacagcaaagcctctttggaggctgaatggggtcccccgactctggctttcccccaggtatacatgttcctggtgaaatggcaggacctgt

SEQ ID NO: 28477 - RNA, 91 nt, synthetic construct
  source 1..91: mol_type = other RNA
cacagcaaagcctctttggaggctgaatggggtcccccgactctggctttcccccaggtttacatgttcctggtgaaatggcaggatctgt

SEQ ID NO: 28478 - RNA, 91 nt, synthetic construct
  source 1..91: mol_type = other RNA
cacagcaaagcctctttggaggctgaatggggtcccccgactctggctttcccccaggtttacatgttcctggtgaaatggcaggacctgt

SEQ ID NO: 28479 - RNA, 91 nt, synthetic construct
  source 1..91: mol_type = other RNA
cacagcaaagcctctttggaggctgaatggggtcccccgactctggctttcccccaggtgtacatgttcctggtgaaatggcaggatctgt

SEQ ID NO: 28480 - RNA, 91 nt, synthetic construct
  source 1..91: mol_type = other RNA
cacagcaaagcctctttggaggctgaatggggtcccccgactctggctttcccccaggtatacatgttcctggtgaaatggcaggatctgt

SEQ ID NO: 28481 - RNA, 92 nt, synthetic construct
  source 1..92: mol_type = other RNA
acacagcaaagcctctttggaggctgaatggggtcccccgactctggctttcccccaggtatacatgttcctggtgaaatggcaggacctgt

SEQ ID NO: 28482 - RNA, 92 nt, synthetic construct
  source 1..92: mol_type = other RNA
acacagcaaagcctctttggaggctgaatggggtcccccgactctggctttcccccaggtatacatgttcctggtgaaatggcaggatctgt

SEQ ID NO: 28483 - RNA, 92 nt, synthetic construct
  source 1..92: mol_type = other RNA
acacagcaaagcctctttggaggctgaatggggtcccccgactctggctttcccccaggtctacatgttcctggtgaaatggcaggacctgt

SEQ ID NO: 28484 - RNA, 92 nt, synthetic construct
  source 1..92: mol_type = other RNA
acacagcaaagcctctttggaggctgaatggggtcccccgactctggctttcccccaggtctacatgttcctggtgaaatggcaggatctgt

SEQ ID NO: 28485 - RNA, 92 nt, synthetic construct
  source 1..92: mol_type = other RNA
acacagcaaagcctctttggaggctgaatggggtcccccgactctggctttcccccaggtgtacatgttcctggtgaaatggcaggacctgt

SEQ ID NO: 28486 - RNA, 92 nt, synthetic construct
  source 1..92: mol_type = other RNA
acacagcaaagcctctttggaggctgaatggggtcccccgactctggctttcccccaggtttacatgttcctggtgaaatggcaggacctgt

SEQ ID NO: 28487 - RNA, 92 nt, synthetic construct
  source 1..92: mol_type = other RNA
acacagcaaagcctctttggaggctgaatggggtcccccgactctggctttcccccaggtttacatgttcctggtgaaatggcaggatctgt

SEQ ID NO: 28488 - RNA, 92 nt, synthetic construct
  source 1..92: mol_type = other RNA
acacagcaaagcctctttggaggctgaatggggtcccccgactctggctttcccccaggtgtacatgttcctggtgaaatggcaggatctgt

SEQ ID NO: 28489 - RNA, 93 nt, synthetic construct
  source 1..93: mol_type = other RNA
cacacagcaaagcctctttggaggctgaatggggtcccccgactctggctttcccccaggtgtacatgttcctggtgaaatggcaggatctgt

SEQ ID NO: 28490 - RNA, 93 nt, synthetic construct
  source 1..93: mol_type = other RNA
cacacagcaaagcctctttggaggctgaatggggtcccccgactctggctttcccccaggtctacatgttcctggtgaaatggcaggatctgt

SEQ ID NO: 28491 - RNA, 93 nt, synthetic construct
  source 1..93: mol_type = other RNA
cacacagcaaagcctctttggaggctgaatggggtcccccgactctggctttcccccaggtctacatgttcctggtgaaatggcaggacctgt

SEQ ID NO: 28492 - RNA, 93 nt, synthetic construct
  source 1..93: mol_type = other RNA
cacacagcaaagcctctttggaggctgaatggggtcccccgactctggctttcccccaggtatacatgttcctggtgaaatggcaggatctgt

SEQ ID NO: 28493 - RNA, 93 nt, synthetic construct
  source 1..93: mol_type = other RNA
cacacagcaaagcctctttggaggctgaatggggtcccccgactctggctttcccccaggtatacatgttcctggtgaaatggcaggacctgt

SEQ ID NO: 28494 - RNA, 93 nt, synthetic construct
  source 1..93: mol_type = other RNA
cacacagcaaagcctctttggaggctgaatggggtcccccgactctggctttcccccaggtttacatgttcctggtgaaatggcaggacctgt

SEQ ID NO: 28495 - RNA, 93 nt, synthetic construct
  source 1..93: mol_type = other RNA
cacacagcaaagcctctttggaggctgaatggggtcccccgactctggctttcccccaggtttacatgttcctggtgaaatggcaggatctgt

SEQ ID NO: 28496 - RNA, 93 nt, synthetic construct
  source 1..93: mol_type = other RNA
cacacagcaaagcctctttggaggctgaatggggtcccccgactctggctttcccccaggtgtacatgttcctggtgaaatggcaggacctgt

SEQ ID NO: 28497 - RNA, 94 nt, synthetic construct
  source 1..94: mol_type = other RNA
gcacacagcaaagcctctttggaggctgaatggggtcccccgactctggctttcccccaggtatacatgttcctggtgaaatggcaggatctgt

SEQ ID NO: 28498 - RNA, 94 nt, synthetic construct
  source 1..94: mol_type = other RNA
gcacacagcaaagcctctttggaggctgaatggggtcccccgactctggctttcccccaggtatacatgttcctggtgaaatggcaggacctgt

SEQ ID NO: 28499 - RNA, 94 nt, synthetic construct
  source 1..94: mol_type = other RNA
gcacacagcaaagcctctttggaggctgaatggggtcccccgactctggctttcccccaggtctacatgttcctggtgaaatggcaggatctgt

SEQ ID NO: 28500 - RNA, 94 nt, synthetic construct
  source 1..94: mol_type = other RNA
gcacacagcaaagcctctttggaggctgaatggggtcccccgactctggctttcccccaggtctacatgttcctggtgaaatggcaggacctgt

SEQ ID NO: 28501 - RNA, 94 nt, synthetic construct
  source 1..94: mol_type = other RNA
gcacacagcaaagcctctttggaggctgaatggggtcccccgactctggctttcccccaggtgtacatgttcctggtgaaatggcaggacctgt

SEQ ID NO: 28502 - RNA, 94 nt, synthetic construct
  source 1..94: mol_type = other RNA
gcacacagcaaagcctctttggaggctgaatggggtcccccgactctggctttcccccaggtttacatgttcctggtgaaatggcaggatctgt

SEQ ID NO: 28503 - RNA, 94 nt, synthetic construct
  source 1..94: mol_type = other RNA
gcacacagcaaagcctctttggaggctgaatggggtcccccgactctggctttcccccaggtttacatgttcctggtgaaatggcaggacctgt

SEQ ID NO: 28504 - RNA, 94 nt, synthetic construct
  source 1..94: mol_type = other RNA
gcacacagcaaagcctctttggaggctgaatggggtcccccgactctggctttcccccaggtgtacatgttcctggtgaaatggcaggatctgt

SEQ ID NO: 28505 - RNA, 95 nt, synthetic construct
  source 1..95: mol_type = other RNA
tgcacacagcaaagcctctttggaggctgaatggggtcccccgactctggctttcccccaggtttacatgttcctggtgaaatggcaggacctgt

SEQ ID NO: 28506 - RNA, 95 nt, synthetic construct
  source 1..95: mol_type = other RNA
tgcacacagcaaagcctctttggaggctgaatggggtcccccgactctggctttcccccaggtctacatgttcctggtgaaatggcaggacctgt

SEQ ID NO: 28507 - RNA, 95 nt, synthetic construct
  source 1..95: mol_type = other RNA
tgcacacagcaaagcctctttggaggctgaatggggtcccccgactctggctttcccccaggtgtacatgttcctggtgaaatggcaggacctgt

SEQ ID NO: 28508 - RNA, 95 nt, synthetic construct
  source 1..95: mol_type = other RNA
tgcacacagcaaagcctctttggaggctgaatggggtcccccgactctggctttcccccaggtctacatgttcctggtgaaatggcaggatctgt

SEQ ID NO: 28509 - RNA, 95 nt, synthetic construct
  source 1..95: mol_type = other RNA
tgcacacagcaaagcctctttggaggctgaatggggtcccccgactctggctttcccccaggtttacatgttcctggtgaaatggcaggatctgt

SEQ ID NO: 28510 - RNA, 95 nt, synthetic construct
  source 1..95: mol_type = other RNA
tgcacacagcaaagcctctttggaggctgaatggggtcccccgactctggctttcccccaggtatacatgttcctggtgaaatggcaggacctgt

SEQ ID NO: 28511 - RNA, 95 nt, synthetic construct
  source 1..95: mol_type = other RNA
tgcacacagcaaagcctctttggaggctgaatggggtcccccgactctggctttcccccaggtgtacatgttcctggtgaaatggcaggatctgt

SEQ ID NO: 28512 - RNA, 95 nt, synthetic construct
  source 1..95: mol_type = other RNA
tgcacacagcaaagcctctttggaggctgaatggggtcccccgactctggctttcccccaggtatacatgttcctggtgaaatggcaggatctgt

SEQ ID NO: 28513 - RNA, 96 nt, synthetic construct
  source 1..96: mol_type = other RNA
gtgcacacagcaaagcctctttggaggctgaatggggtcccccgactctggctttcccccaggtttacatgttcctggtgaaatggcaggacctgt

SEQ ID NO: 28514 - RNA, 96 nt, synthetic construct
  source 1..96: mol_type = other RNA
gtgcacacagcaaagcctctttggaggctgaatggggtcccccgactctggctttcccccaggtttacatgttcctggtgaaatggcaggatctgt

SEQ ID NO: 28515 - RNA, 96 nt, synthetic construct
  source 1..96: mol_type = other RNA
gtgcacacagcaaagcctctttggaggctgaatggggtcccccgactctggctttcccccaggtgtacatgttcctggtgaaatggcaggatctgt

SEQ ID NO: 28516 - RNA, 96 nt, synthetic construct
  source 1..96: mol_type = other RNA
gtgcacacagcaaagcctctttggaggctgaatggggtcccccgactctggctttcccccaggtatacatgttcctggtgaaatggcaggatctgt

SEQ ID NO: 28517 - RNA, 96 nt, synthetic construct
  source 1..96: mol_type = other RNA
gtgcacacagcaaagcctctttggaggctgaatggggtcccccgactctggctttcccccaggtctacatgttcctggtgaaatggcaggacctgt

SEQ ID NO: 28518 - RNA, 96 nt, synthetic construct
  source 1..96: mol_type = other RNA
gtgcacacagcaaagcctctttggaggctgaatggggtcccccgactctggctttcccccaggtctacatgttcctggtgaaatggcaggatctgt

SEQ ID NO: 28519 - RNA, 96 nt, synthetic construct
  source 1..96: mol_type = other RNA
gtgcacacagcaaagcctctttggaggctgaatggggtcccccgactctggctttcccccaggtgtacatgttcctggtgaaatggcaggacctgt

SEQ ID NO: 28520 - RNA, 96 nt, synthetic construct
  source 1..96: mol_type = other RNA
gtgcacacagcaaagcctctttggaggctgaatggggtcccccgactctggctttcccccaggtatacatgttcctggtgaaatggcaggacctgt

SEQ ID NO: 28521 - RNA, 97 nt, synthetic construct
  source 1..97: mol_type = other RNA
ggtgcacacagcaaagcctctttggaggctgaatggggtcccccgactctggctttcccccaggtgtacatgttcctggtgaaatggcaggacctgt

SEQ ID NO: 28522 - RNA, 97 nt, synthetic construct
  source 1..97: mol_type = other RNA
ggtgcacacagcaaagcctctttggaggctgaatggggtcccccgactctggctttcccccaggtctacatgttcctggtgaaatggcaggatctgt

SEQ ID NO: 28523 - RNA, 97 nt, synthetic construct
  source 1..97: mol_type = other RNA
ggtgcacacagcaaagcctctttggaggctgaatggggtcccccgactctggctttcccccaggtatacatgttcctggtgaaatggcaggacctgt

SEQ ID NO: 28524 - RNA, 97 nt, synthetic construct
  source 1..97: mol_type = other RNA
ggtgcacacagcaaagcctctttggaggctgaatggggtcccccgactctggctttcccccaggtctacatgttcctggtgaaatggcaggacctgt

SEQ ID NO: 28525 - RNA, 97 nt, synthetic construct
  source 1..97: mol_type = other RNA
ggtgcacacagcaaagcctctttggaggctgaatggggtcccccgactctggctttcccccaggtttacatgttcctggtgaaatggcaggatctgt

SEQ ID NO: 28526 - RNA, 97 nt, synthetic construct
  source 1..97: mol_type = other RNA
ggtgcacacagcaaagcctctttggaggctgaatggggtcccccgactctggctttcccccaggtttacatgttcctggtgaaatggcaggacctgt

SEQ ID NO: 28527 - RNA, 97 nt, synthetic construct
  source 1..97: mol_type = other RNA
ggtgcacacagcaaagcctctttggaggctgaatggggtcccccgactctggctttcccccaggtatacatgttcctggtgaaatggcaggatctgt

SEQ ID NO: 28528 - RNA, 97 nt, synthetic construct
  source 1..97: mol_type = other RNA
ggtgcacacagcaaagcctctttggaggctgaatggggtcccccgactctggctttcccccaggtgtacatgttcctggtgaaatggcaggatctgt

SEQ ID NO: 28529 - RNA, 98 nt, synthetic construct
  source 1..98: mol_type = other RNA
gggtgcacacagcaaagcctctttggaggctgaatggggtcccccgactctggctttcccccaggtgtacatgttcctggtgaaatggcaggatctgt

SEQ ID NO: 28530 - RNA, 98 nt, synthetic construct
  source 1..98: mol_type = other RNA
gggtgcacacagcaaagcctctttggaggctgaatggggtcccccgactctggctttcccccaggtttacatgttcctggtgaaatggcaggacctgt

SEQ ID NO: 28531 - RNA, 98 nt, synthetic construct
  source 1..98: mol_type = other RNA
gggtgcacacagcaaagcctctttggaggctgaatggggtcccccgactctggctttcccccaggtgtacatgttcctggtgaaatggcaggacctgt

SEQ ID NO: 28532 - RNA, 98 nt, synthetic construct
  source 1..98: mol_type = other RNA
gggtgcacacagcaaagcctctttggaggctgaatggggtcccccgactctggctttcccccaggtttacatgttcctggtgaaatggcaggatctgt

SEQ ID NO: 28533 - RNA, 98 nt, synthetic construct
  source 1..98: mol_type = other RNA
gggtgcacacagcaaagcctctttggaggctgaatggggtcccccgactctggctttcccccaggtatacatgttcctggtgaaatggcaggatctgt

SEQ ID NO: 28534 - RNA, 98 nt, synthetic construct
  source 1..98: mol_type = other RNA
gggtgcacacagcaaagcctctttggaggctgaatggggtcccccgactctggctttcccccaggtctacatgttcctggtgaaatggcaggatctgt

SEQ ID NO: 28535 - RNA, 98 nt, synthetic construct
  source 1..98: mol_type = other RNA
gggtgcacacagcaaagcctctttggaggctgaatggggtcccccgactctggctttcccccaggtatacatgttcctggtgaaatggcaggacctgt

SEQ ID NO: 28536 - RNA, 98 nt, synthetic construct
  source 1..98: mol_type = other RNA
gggtgcacacagcaaagcctctttggaggctgaatggggtcccccgactctggctttcccccaggtctacatgttcctggtgaaatggcaggacctgt

SEQ ID NO: 28537 - RNA, 99 nt, synthetic construct
  source 1..99: mol_type = other RNA
tgggtgcacacagcaaagcctctttggaggctgaatggggtcccccgactctggctttcccccaggtctacatgttcctggtgaaatggcaggatctgt

SEQ ID NO: 28538 - RNA, 99 nt, synthetic construct
  source 1..99: mol_type = other RNA
tgggtgcacacagcaaagcctctttggaggctgaatggggtcccccgactctggctttcccccaggtatacatgttcctggtgaaatggcaggacctgt

SEQ ID NO: 28539 - RNA, 99 nt, synthetic construct
  source 1..99: mol_type = other RNA
tgggtgcacacagcaaagcctctttggaggctgaatggggtcccccgactctggctttcccccaggtatacatgttcctggtgaaatggcaggatctgt

SEQ ID NO: 28540 - RNA, 99 nt, synthetic construct
  source 1..99: mol_type = other RNA
tgggtgcacacagcaaagcctctttggaggctgaatggggtcccccgactctggctttcccccaggtctacatgttcctggtgaaatggcaggacctgt

SEQ ID NO: 28541 - RNA, 99 nt, synthetic construct
  source 1..99: mol_type = other RNA
tgggtgcacacagcaaagcctctttggaggctgaatggggtcccccgactctggctttcccccaggtgtacatgttcctggtgaaatggcaggacctgt

SEQ ID NO: 28542 - RNA, 99 nt, synthetic construct
  source 1..99: mol_type = other RNA
tgggtgcacacagcaaagcctctttggaggctgaatggggtcccccgactctggctttcccccaggtttacatgttcctggtgaaatggcaggacctgt

SEQ ID NO: 28543 - RNA, 99 nt, synthetic construct
  source 1..99: mol_type = other RNA
tgggtgcacacagcaaagcctctttggaggctgaatggggtcccccgactctggctttcccccaggtgtacatgttcctggtgaaatggcaggatctgt

SEQ ID NO: 28544 - RNA, 99 nt, synthetic construct
  source 1..99: mol_type = other RNA
tgggtgcacacagcaaagcctctttggaggctgaatggggtcccccgactctggctttcccccaggtttacatgttcctggtgaaatggcaggatctgt

SEQ ID NO: 28545 - RNA, 100 nt, synthetic construct
  source 1..100: mol_type = other RNA
ctgggtgcacacagcaaagcctctttggaggctgaatggggtcccccgactctggctttcccccaggtgtacatgttcctggtgaaatggcaggatctgt

SEQ ID NO: 28546 - RNA, 100 nt, synthetic construct
  source 1..100: mol_type = other RNA
ctgggtgcacacagcaaagcctctttggaggctgaatggggtcccccgactctggctttcccccaggtgtacatgttcctggtgaaatggcaggacctgt

SEQ ID NO: 28547 - RNA, 100 nt, synthetic construct
  source 1..100: mol_type = other RNA
ctgggtgcacacagcaaagcctctttggaggctgaatggggtcccccgactctggctttcccccaggtttacatgttcctggtgaaatggcaggatctgt

SEQ ID NO: 28548 - RNA, 100 nt, synthetic construct
  source 1..100: mol_type = other RNA
ctgggtgcacacagcaaagcctctttggaggctgaatggggtcccccgactctggctttcccccaggtatacatgttcctggtgaaatggcaggatctgt

SEQ ID NO: 28549 - RNA, 100 nt, synthetic construct
  source 1..100: mol_type = other RNA
ctgggtgcacacagcaaagcctctttggaggctgaatggggtcccccgactctggctttcccccaggtatacatgttcctggtgaaatggcaggacctgt

SEQ ID NO: 28550 - RNA, 100 nt, synthetic construct
  source 1..100: mol_type = other RNA
ctgggtgcacacagcaaagcctctttggaggctgaatggggtcccccgactctggctttcccccaggtttacatgttcctggtgaaatggcaggacctgt

SEQ ID NO: 28551 - RNA, 100 nt, synthetic construct
  source 1..100: mol_type = other RNA
ctgggtgcacacagcaaagcctctttggaggctgaatggggtcccccgactctggctttcccccaggtctacatgttcctggtgaaatggcaggatctgt

SEQ ID NO: 28552 - RNA, 100 nt, synthetic construct
  source 1..100: mol_type = other RNA
ctgggtgcacacagcaaagcctctttggaggctgaatggggtcccccgactctggctttcccccaggtctacatgttcctggtgaaatggcaggacctgt

SEQ ID NO: 28553 - RNA, 101 nt, synthetic construct
  source 1..101: mol_type = other RNA
cctgggtgcacacagcaaagcctctttggaggctgaatggggtcccccgactctggctttcccccaggtgtacatgttcctggtgaaatggcaggatctgt

SEQ ID NO: 28554 - RNA, 101 nt, synthetic construct
  source 1..101: mol_type = other RNA
cctgggtgcacacagcaaagcctctttggaggctgaatggggtcccccgactctggctttcccccaggtttacatgttcctggtgaaatggcaggatctgt

SEQ ID NO: 28555 - RNA, 101 nt, synthetic construct
  source 1..101: mol_type = other RNA
cctgggtgcacacagcaaagcctctttggaggctgaatggggtcccccgactctggctttcccccaggtgtacatgttcctggtgaaatggcaggacctgt

SEQ ID NO: 28556 - RNA, 101 nt, synthetic construct
  source 1..101: mol_type = other RNA
cctgggtgcacacagcaaagcctctttggaggctgaatggggtcccccgactctggctttcccccaggtctacatgttcctggtgaaatggcaggatctgt

SEQ ID NO: 28557 - RNA, 101 nt, synthetic construct
  source 1..101: mol_type = other RNA
cctgggtgcacacagcaaagcctctttggaggctgaatggggtcccccgactctggctttcccccaggtctacatgttcctggtgaaatggcaggacctgt

SEQ ID NO: 28558 - RNA, 101 nt, synthetic construct
  source 1..101: mol_type = other RNA
cctgggtgcacacagcaaagcctctttggaggctgaatggggtcccccgactctggctttcccccaggtttacatgttcctggtgaaatggcaggacctgt

SEQ ID NO: 28559 - RNA, 101 nt, synthetic construct
  source 1..101: mol_type = other RNA
cctgggtgcacacagcaaagcctctttggaggctgaatggggtcccccgactctggctttcccccaggtatacatgttcctggtgaaatggcaggacctgt

SEQ ID NO: 28560 - RNA, 101 nt, synthetic construct
  source 1..101: mol_type = other RNA
cctgggtgcacacagcaaagcctctttggaggctgaatggggtcccccgactctggctttcccccaggtatacatgttcctggtgaaatggcaggatctgt

SEQ ID NO: 28561 - RNA, 102 nt, synthetic construct
  source 1..102: mol_type = other RNA
tcctgggtgcacacagcaaagcctctttggaggctgaatggggtcccccgactctggctttcccccaggtatacatgttcctggtgaaatggcaggatctgt

SEQ ID NO: 28562 - RNA, 102 nt, synthetic construct
  source 1..102: mol_type = other RNA
tcctgggtgcacacagcaaagcctctttggaggctgaatggggtcccccgactctggctttcccccaggtttacatgttcctggtgaaatggcaggatctgt

SEQ ID NO: 28563 - RNA, 102 nt, synthetic construct
  source 1..102: mol_type = other RNA
tcctgggtgcacacagcaaagcctctttggaggctgaatggggtcccccgactctggctttcccccaggtttacatgttcctggtgaaatggcaggacctgt

SEQ ID NO: 28564 - RNA, 102 nt, synthetic construct
  source 1..102: mol_type = other RNA
tcctgggtgcacacagcaaagcctctttggaggctgaatggggtcccccgactctggctttcccccaggtgtacatgttcctggtgaaatggcaggacctgt

SEQ ID NO: 28565 - RNA, 102 nt, synthetic construct
  source 1..102: mol_type = other RNA
tcctgggtgcacacagcaaagcctctttggaggctgaatggggtcccccgactctggctttcccccaggtctacatgttcctggtgaaatggcaggatctgt

SEQ ID NO: 28566 - RNA, 102 nt, synthetic construct
  source 1..102: mol_type = other RNA
tcctgggtgcacacagcaaagcctctttggaggctgaatggggtcccccgactctggctttcccccaggtctacatgttcctggtgaaatggcaggacctgt

SEQ ID NO: 28567 - RNA, 102 nt, synthetic construct
  source 1..102: mol_type = other RNA
tcctgggtgcacacagcaaagcctctttggaggctgaatggggtcccccgactctggctttcccccaggtatacatgttcctggtgaaatggcaggacctgt

SEQ ID NO: 28568 - RNA, 102 nt, synthetic construct
  source 1..102: mol_type = other RNA
tcctgggtgcacacagcaaagcctctttggaggctgaatggggtcccccgactctggctttcccccaggtgtacatgttcctggtgaaatggcaggatctgt

SEQ ID NO: 28569 - RNA, 103 nt, synthetic construct
  source 1..103: mol_type = other RNA
atcctgggtgcacacagcaaagcctctttggaggctgaatggggtcccccgactctggctttcccccaggtatacatgttcctggtgaaatggcaggacctgt

SEQ ID NO: 28570 - RNA, 103 nt, synthetic construct
  source 1..103: mol_type = other RNA
atcctgggtgcacacagcaaagcctctttggaggctgaatggggtcccccgactctggctttcccccaggtctacatgttcctggtgaaatggcaggatctgt

SEQ ID NO: 28571 - RNA, 103 nt, synthetic construct
  source 1..103: mol_type = other RNA
atcctgggtgcacacagcaaagcctctttggaggctgaatggggtcccccgactctggctttcccccaggtgtacatgttcctggtgaaatggcaggacctgt

SEQ ID NO: 28572 - RNA, 103 nt, synthetic construct
  source 1..103: mol_type = other RNA
atcctgggtgcacacagcaaagcctctttggaggctgaatggggtcccccgactctggctttcccccaggtgtacatgttcctggtgaaatggcaggatctgt

SEQ ID NO: 28573 - RNA, 103 nt, synthetic construct
  source 1..103: mol_type = other RNA
atcctgggtgcacacagcaaagcctctttggaggctgaatggggtcccccgactctggctttcccccaggtttacatgttcctggtgaaatggcaggacctgt

SEQ ID NO: 28574 - RNA, 103 nt, synthetic construct
  source 1..103: mol_type = other RNA
atcctgggtgcacacagcaaagcctctttggaggctgaatggggtcccccgactctggctttcccccaggtttacatgttcctggtgaaatggcaggatctgt

SEQ ID NO: 28575 - RNA, 103 nt, synthetic construct
  source 1..103: mol_type = other RNA
atcctgggtgcacacagcaaagcctctttggaggctgaatggggtcccccgactctggctttcccccaggtatacatgttcctggtgaaatggcaggatctgt

SEQ ID NO: 28576 - RNA, 103 nt, synthetic construct
  source 1..103: mol_type = other RNA
atcctgggtgcacacagcaaagcctctttggaggctgaatggggtcccccgactctggctttcccccaggtctacatgttcctggtgaaatggcaggacctgt

SEQ ID NO: 28577 - RNA, 20 nt, synthetic construct
  source 1..20: mol_type = other RNA
gtgaaatggcaggatctgtc

SEQ ID NO: 28578 - RNA, 20 nt, synthetic construct
  source 1..20: mol_type = other RNA
cctggtgaaatggcaggatc

SEQ ID NO: 28579 - RNA, 20 nt, synthetic construct
  source 1..20: mol_type = other RNA
gaaatggcaggatctgtcgg

SEQ ID NO: 28580 - RNA, 16 nt, synthetic construct
  source 1..16: mol_type = other RNA
cctccagtgggtagtg

SEQ ID NO: 28581 - RNA, 17 nt, synthetic construct
  source 1..17: mol_type = other RNA
tcctccagtgggtagtg

SEQ ID NO: 28582 - RNA, 18 nt, synthetic construct
  source 1..18: mol_type = other RNA
ttcctccagtgggtagtg

SEQ ID NO: 28583 - RNA, 19 nt, synthetic construct
  source 1..19: mol_type = other RNA
cttcctccagtgggtagtg

SEQ ID NO: 28584 - RNA, 20 nt, synthetic construct
  source 1..20: mol_type = other RNA
gcttcctccagtgggtagtg

SEQ ID NO: 28585 - RNA, 21 nt, synthetic construct
  source 1..21: mol_type = other RNA
ggcttcctccagtgggtagtg

SEQ ID NO: 28586 - RNA, 22 nt, synthetic construct
  source 1..22: mol_type = other RNA
gggcttcctccagtgggtagtg

SEQ ID NO: 28587-28592 - skipped (6 entries)

SEQ ID NO: 28593 - RNA, 10 nt, synthetic construct
  source 1..10: mol_type = other RNA
tacccactgg

SEQ ID NO: 28594 - RNA, 11 nt, synthetic construct
  source 1..11: mol_type = other RNA
tacccactgga

SEQ ID NO: 28595 - RNA, 12 nt, synthetic construct
  source 1..12: mol_type = other RNA
tacccactggag

SEQ ID NO: 28596 - RNA, 13 nt, synthetic construct
  source 1..13: mol_type = other RNA
tacccactggagg

SEQ ID NO: 28597 - RNA, 14 nt, synthetic construct
  source 1..14: mol_type = other RNA
tacccactggagga

SEQ ID NO: 28598 - RNA, 15 nt, synthetic construct
  source 1..15: mol_type = other RNA
tacccactggaggaa

SEQ ID NO: 28599 - RNA, 16 nt, synthetic construct
  source 1..16: mol_type = other RNA
tacccactggaggaag

SEQ ID NO: 28600 - RNA, 17 nt, synthetic construct
  source 1..17: mol_type = other RNA
tacccactggaggaagc

SEQ ID NO: 28601 - RNA, 18 nt, synthetic construct
  source 1..18: mol_type = other RNA
tacccactggaggaagcc

SEQ ID NO: 28602 - RNA, 19 nt, synthetic construct
  source 1..19: mol_type = other RNA
tacccactggaggaagccc

SEQ ID NO: 28603 - RNA, 76 nt, synthetic construct
  source 1..76: mol_type = other RNA
acctgggggaaagccagagtcgggggaccccattcagcctccaaagaggctttgctgtgtgcacccaggatcccac

SEQ ID NO: 28604 - RNA, 77 nt, synthetic construct
  source 1..77: mol_type = other RNA
tacctgggggaaagccagagtcgggggaccccattcagcctccaaagaggctttgctgtgtgcacccaggatcccac

SEQ ID NO: 28605 - RNA, 77 nt, synthetic construct
  source 1..77: mol_type = other RNA
gacctgggggaaagccagagtcgggggaccccattcagcctccaaagaggctttgctgtgtgcacccaggatcccac

SEQ ID NO: 28606 - RNA, 77 nt, synthetic construct
  source 1..77: mol_type = other RNA
cacctgggggaaagccagagtcgggggaccccattcagcctccaaagaggctttgctgtgtgcacccaggatcccac

SEQ ID NO: 28607 - RNA, 77 nt, synthetic construct
  source 1..77: mol_type = other RNA
aacctgggggaaagccagagtcgggggaccccattcagcctccaaagaggctttgctgtgtgcacccaggatcccac

SEQ ID NO: 28608 - RNA, 78 nt, synthetic construct
  source 1..78: mol_type = other RNA
acacctgggggaaagccagagtcgggggaccccattcagcctccaaagaggctttgctgtgtgcacccaggatcccac

SEQ ID NO: 28609 - RNA, 78 nt, synthetic construct
  source 1..78: mol_type = other RNA
aaacctgggggaaagccagagtcgggggaccccattcagcctccaaagaggctttgctgtgtgcacccaggatcccac

SEQ ID NO: 28610 - RNA, 78 nt, synthetic construct
  source 1..78: mol_type = other RNA
agacctgggggaaagccagagtcgggggaccccattcagcctccaaagaggctttgctgtgtgcacccaggatcccac

SEQ ID NO: 28611 - RNA, 78 nt, synthetic construct
  source 1..78: mol_type = other RNA
atacctgggggaaagccagagtcgggggaccccattcagcctccaaagaggctttgctgtgtgcacccaggatcccac

SEQ ID NO: 28612 - RNA, 79 nt, synthetic construct
  source 1..79: mol_type = other RNA
tatacctgggggaaagccagagtcgggggaccccattcagcctccaaagaggctttgctgtgtgcacccaggatcccac

SEQ ID NO: 28613 - RNA, 79 nt, synthetic construct
  source 1..79: mol_type = other RNA
tagacctgggggaaagccagagtcgggggaccccattcagcctccaaagaggctttgctgtgtgcacccaggatcccac

SEQ ID NO: 28614 - RNA, 79 nt, synthetic construct
  source 1..79: mol_type = other RNA
taaacctgggggaaagccagagtcgggggaccccattcagcctccaaagaggctttgctgtgtgcacccaggatcccac

SEQ ID NO: 28615 - RNA, 79 nt, synthetic construct
  source 1..79: mol_type = other RNA
tacacctgggggaaagccagagtcgggggaccccattcagcctccaaagaggctttgctgtgtgcacccaggatcccac

SEQ ID NO: 28616 - RNA, 80 nt, synthetic construct
  source 1..80: mol_type = other RNA
gtatacctgggggaaagccagagtcgggggaccccattcagcctccaaagaggctttgctgtgtgcacccaggatcccac

SEQ ID NO: 28617 - RNA, 80 nt, synthetic construct
  source 1..80: mol_type = other RNA
gtagacctgggggaaagccagagtcgggggaccccattcagcctccaaagaggctttgctgtgtgcacccaggatcccac

SEQ ID NO: 28618 - RNA, 80 nt, synthetic construct
  source 1..80: mol_type = other RNA
gtacacctgggggaaagccagagtcgggggaccccattcagcctccaaagaggctttgctgtgtgcacccaggatcccac

SEQ ID NO: 28619 - RNA, 80 nt, synthetic construct
  source 1..80: mol_type = other RNA
gtaaacctgggggaaagccagagtcgggggaccccattcagcctccaaagaggctttgctgtgtgcacccaggatcccac

SEQ ID NO: 28620 - RNA, 81 nt, synthetic construct
  source 1..81: mol_type = other RNA
tgtaaacctgggggaaagccagagtcgggggaccccattcagcctccaaagaggctttgctgtgtgcacccaggatcccac

SEQ ID NO: 28621 - RNA, 81 nt, synthetic construct
  source 1..81: mol_type = other RNA
tgtatacctgggggaaagccagagtcgggggaccccattcagcctccaaagaggctttgctgtgtgcacccaggatcccac

SEQ ID NO: 28622 - RNA, 81 nt, synthetic construct
  source 1..81: mol_type = other RNA
tgtagacctgggggaaagccagagtcgggggaccccattcagcctccaaagaggctttgctgtgtgcacccaggatcccac

SEQ ID NO: 28623 - RNA, 81 nt, synthetic construct
  source 1..81: mol_type = other RNA
tgtacacctgggggaaagccagagtcgggggaccccattcagcctccaaagaggctttgctgtgtgcacccaggatcccac

SEQ ID NO: 28624 - RNA, 82 nt, synthetic construct
  source 1..82: mol_type = other RNA
atgtagacctgggggaaagccagagtcgggggaccccattcagcctccaaagaggctttgctgtgtgcacccaggatcccac

SEQ ID NO: 28625 - RNA, 82 nt, synthetic construct
  source 1..82: mol_type = other RNA
atgtacacctgggggaaagccagagtcgggggaccccattcagcctccaaagaggctttgctgtgtgcacccaggatcccac

SEQ ID NO: 28626 - RNA, 82 nt, synthetic construct
  source 1..82: mol_type = other RNA
atgtaaacctgggggaaagccagagtcgggggaccccattcagcctccaaagaggctttgctgtgtgcacccaggatcccac

SEQ ID NO: 28627 - RNA, 82 nt, synthetic construct
  source 1..82: mol_type = other RNA
atgtatacctgggggaaagccagagtcgggggaccccattcagcctccaaagaggctttgctgtgtgcacccaggatcccac

SEQ ID NO: 28628 - RNA, 83 nt, synthetic construct
  source 1..83: mol_type = other RNA
catgtacacctgggggaaagccagagtcgggggaccccattcagcctccaaagaggctttgctgtgtgcacccaggatcccac

SEQ ID NO: 28629 - RNA, 83 nt, synthetic construct
  source 1..83: mol_type = other RNA
catgtaaacctgggggaaagccagagtcgggggaccccattcagcctccaaagaggctttgctgtgtgcacccaggatcccac

SEQ ID NO: 28630 - RNA, 83 nt, synthetic construct
  source 1..83: mol_type = other RNA
catgtagacctgggggaaagccagagtcgggggaccccattcagcctccaaagaggctttgctgtgtgcacccaggatcccac

SEQ ID NO: 28631 - RNA, 83 nt, synthetic construct
  source 1..83: mol_type = other RNA
catgtatacctgggggaaagccagagtcgggggaccccattcagcctccaaagaggctttgctgtgtgcacccaggatcccac

SEQ ID NO: 28632 - RNA, 84 nt, synthetic construct
  source 1..84: mol_type = other RNA
acatgtaaacctgggggaaagccagagtcgggggaccccattcagcctccaaagaggctttgctgtgtgcacccaggatcccac

SEQ ID NO: 28633 - RNA, 84 nt, synthetic construct
  source 1..84: mol_type = other RNA
acatgtacacctgggggaaagccagagtcgggggaccccattcagcctccaaagaggctttgctgtgtgcacccaggatcccac

SEQ ID NO: 28634 - RNA, 84 nt, synthetic construct
  source 1..84: mol_type = other RNA
acatgtagacctgggggaaagccagagtcgggggaccccattcagcctccaaagaggctttgctgtgtgcacccaggatcccac

SEQ ID NO: 28635 - RNA, 84 nt, synthetic construct
  source 1..84: mol_type = other RNA
acatgtatacctgggggaaagccagagtcgggggaccccattcagcctccaaagaggctttgctgtgtgcacccaggatcccac

SEQ ID NO: 28636 - RNA, 85 nt, synthetic construct
  source 1..85: mol_type = other RNA
aacatgtaaacctgggggaaagccagagtcgggggaccccattcagcctccaaagaggctttgctgtgtgcacccaggatcccac

SEQ ID NO: 28637 - RNA, 85 nt, synthetic construct
  source 1..85: mol_type = other RNA
aacatgtacacctgggggaaagccagagtcgggggaccccattcagcctccaaagaggctttgctgtgtgcacccaggatcccac

SEQ ID NO: 28638 - RNA, 85 nt, synthetic construct
  source 1..85: mol_type = other RNA
aacatgtagacctgggggaaagccagagtcgggggaccccattcagcctccaaagaggctttgctgtgtgcacccaggatcccac

SEQ ID NO: 28639 - RNA, 85 nt, synthetic construct
  source 1..85: mol_type = other RNA
aacatgtatacctgggggaaagccagagtcgggggaccccattcagcctccaaagaggctttgctgtgtgcacccaggatcccac

SEQ ID NO: 28640 - RNA, 86 nt, synthetic construct
  source 1..86: mol_type = other RNA
gaacatgtatacctgggggaaagccagagtcgggggaccccattcagcctccaaagaggctttgctgtgtgcacccaggatcccac

SEQ ID NO: 28641 - RNA, 86 nt, synthetic construct
  source 1..86: mol_type = other RNA
gaacatgtacacctgggggaaagccagagtcgggggaccccattcagcctccaaagaggctttgctgtgtgcacccaggatcccac

SEQ ID NO: 28642 - RNA, 86 nt, synthetic construct
  source 1..86: mol_type = other RNA
gaacatgtaaacctgggggaaagccagagtcgggggaccccattcagcctccaaagaggctttgctgtgtgcacccaggatcccac

SEQ ID NO: 28643 - RNA, 86 nt, synthetic construct
  source 1..86: mol_type = other RNA
gaacatgtagacctgggggaaagccagagtcgggggaccccattcagcctccaaagaggctttgctgtgtgcacccaggatcccac

SEQ ID NO: 28644 - RNA, 87 nt, synthetic construct
  source 1..87: mol_type = other RNA
ggaacatgtagacctgggggaaagccagagtcgggggaccccattcagcctccaaagaggctttgctgtgtgcacccaggatcccac

SEQ ID NO: 28645 - RNA, 87 nt, synthetic construct
  source 1..87: mol_type = other RNA
ggaacatgtaaacctgggggaaagccagagtcgggggaccccattcagcctccaaagaggctttgctgtgtgcacccaggatcccac

SEQ ID NO: 28646 - RNA, 87 nt, synthetic construct
  source 1..87: mol_type = other RNA
ggaacatgtacacctgggggaaagccagagtcgggggaccccattcagcctccaaagaggctttgctgtgtgcacccaggatcccac

SEQ ID NO: 28647 - RNA, 87 nt, synthetic construct
  source 1..87: mol_type = other RNA
ggaacatgtatacctgggggaaagccagagtcgggggaccccattcagcctccaaagaggctttgctgtgtgcacccaggatcccac

SEQ ID NO: 28648 - RNA, 88 nt, synthetic construct
  source 1..88: mol_type = other RNA
aggaacatgtaaacctgggggaaagccagagtcgggggaccccattcagcctccaaagaggctttgctgtgtgcacccaggatcccac

SEQ ID NO: 28649 - RNA, 88 nt, synthetic construct
  source 1..88: mol_type = other RNA
aggaacatgtagacctgggggaaagccagagtcgggggaccccattcagcctccaaagaggctttgctgtgtgcacccaggatcccac

SEQ ID NO: 28650 - RNA, 88 nt, synthetic construct
  source 1..88: mol_type = other RNA
aggaacatgtacacctgggggaaagccagagtcgggggaccccattcagcctccaaagaggctttgctgtgtgcacccaggatcccac

SEQ ID NO: 28651 - RNA, 88 nt, synthetic construct
  source 1..88: mol_type = other RNA
aggaacatgtatacctgggggaaagccagagtcgggggaccccattcagcctccaaagaggctttgctgtgtgcacccaggatcccac

SEQ ID NO: 28652 - RNA, 89 nt, synthetic construct
  source 1..89: mol_type = other RNA
caggaacatgtacacctgggggaaagccagagtcgggggaccccattcagcctccaaagaggctttgctgtgtgcacccaggatcccac

SEQ ID NO: 28653 - RNA, 89 nt, synthetic construct
  source 1..89: mol_type = other RNA
caggaacatgtagacctgggggaaagccagagtcgggggaccccattcagcctccaaagaggctttgctgtgtgcacccaggatcccac

SEQ ID NO: 28654 - RNA, 89 nt, synthetic construct
  source 1..89: mol_type = other RNA
caggaacatgtatacctgggggaaagccagagtcgggggaccccattcagcctccaaagaggctttgctgtgtgcacccaggatcccac

SEQ ID NO: 28655 - RNA, 89 nt, synthetic construct
  source 1..89: mol_type = other RNA
caggaacatgtaaacctgggggaaagccagagtcgggggaccccattcagcctccaaagaggctttgctgtgtgcacccaggatcccac

SEQ ID NO: 28656 - RNA, 90 nt, synthetic construct
  source 1..90: mol_type = other RNA
ccaggaacatgtaaacctgggggaaagccagagtcgggggaccccattcagcctccaaagaggctttgctgtgtgcacccaggatcccac

SEQ ID NO: 28657 - RNA, 90 nt, synthetic construct
  source 1..90: mol_type = other RNA
ccaggaacatgtatacctgggggaaagccagagtcgggggaccccattcagcctccaaagaggctttgctgtgtgcacccaggatcccac

SEQ ID NO: 28658 - RNA, 90 nt, synthetic construct
  source 1..90: mol_type = other RNA
ccaggaacatgtagacctgggggaaagccagagtcgggggaccccattcagcctccaaagaggctttgctgtgtgcacccaggatcccac

SEQ ID NO: 28659 - RNA, 90 nt, synthetic construct
  source 1..90: mol_type = other RNA
ccaggaacatgtacacctgggggaaagccagagtcgggggaccccattcagcctccaaagaggctttgctgtgtgcacccaggatcccac

SEQ ID NO: 28660 - RNA, 91 nt, synthetic construct
  source 1..91: mol_type = other RNA
accaggaacatgtacacctgggggaaagccagagtcgggggaccccattcagcctccaaagaggctttgctgtgtgcacccaggatcccac

SEQ ID NO: 28661 - RNA, 91 nt, synthetic construct
  source 1..91: mol_type = other RNA
accaggaacatgtatacctgggggaaagccagagtcgggggaccccattcagcctccaaagaggctttgctgtgtgcacccaggatcccac

SEQ ID NO: 28662 - RNA, 91 nt, synthetic construct
  source 1..91: mol_type = other RNA
accaggaacatgtaaacctgggggaaagccagagtcgggggaccccattcagcctccaaagaggctttgctgtgtgcacccaggatcccac

SEQ ID NO: 28663 - RNA, 91 nt, synthetic construct
  source 1..91: mol_type = other RNA
accaggaacatgtagacctgggggaaagccagagtcgggggaccccattcagcctccaaagaggctttgctgtgtgcacccaggatcccac

SEQ ID NO: 28664 - RNA, 92 nt, synthetic construct
  source 1..92: mol_type = other RNA
caccaggaacatgtaaacctgggggaaagccagagtcgggggaccccattcagcctccaaagaggctttgctgtgtgcacccaggatcccac

SEQ ID NO: 28665 - RNA, 92 nt, synthetic construct
  source 1..92: mol_type = other RNA
caccaggaacatgtacacctgggggaaagccagagtcgggggaccccattcagcctccaaagaggctttgctgtgtgcacccaggatcccac

SEQ ID NO: 28666 - RNA, 92 nt, synthetic construct
  source 1..92: mol_type = other RNA
caccaggaacatgtagacctgggggaaagccagagtcgggggaccccattcagcctccaaagaggctttgctgtgtgcacccaggatcccac

SEQ ID NO: 28667 - RNA, 92 nt, synthetic construct
  source 1..92: mol_type = other RNA
caccaggaacatgtatacctgggggaaagccagagtcgggggaccccattcagcctccaaagaggctttgctgtgtgcacccaggatcccac

SEQ ID NO: 28668 - RNA, 93 nt, synthetic construct
  source 1..93: mol_type = other RNA
tcaccaggaacatgtaaacctgggggaaagccagagtcgggggaccccattcagcctccaaagaggctttgctgtgtgcacccaggatcccac

SEQ ID NO: 28669 - RNA, 93 nt, synthetic construct
  source 1..93: mol_type = other RNA
tcaccaggaacatgtagacctgggggaaagccagagtcgggggaccccattcagcctccaaagaggctttgctgtgtgcacccaggatcccac

SEQ ID NO: 28670 - RNA, 93 nt, synthetic construct
  source 1..93: mol_type = other RNA
tcaccaggaacatgtatacctgggggaaagccagagtcgggggaccccattcagcctccaaagaggctttgctgtgtgcacccaggatcccac

SEQ ID NO: 28671 - RNA, 93 nt, synthetic construct
  source 1..93: mol_type = other RNA
tcaccaggaacatgtacacctgggggaaagccagagtcgggggaccccattcagcctccaaagaggctttgctgtgtgcacccaggatcccac

SEQ ID NO: 28672 - RNA, 94 nt, synthetic construct
  source 1..94: mol_type = other RNA
ttcaccaggaacatgtagacctgggggaaagccagagtcgggggaccccattcagcctccaaagaggctttgctgtgtgcacccaggatcccac

SEQ ID NO: 28673 - RNA, 94 nt, synthetic construct
  source 1..94: mol_type = other RNA
ttcaccaggaacatgtaaacctgggggaaagccagagtcgggggaccccattcagcctccaaagaggctttgctgtgtgcacccaggatcccac

SEQ ID NO: 28674 - RNA, 94 nt, synthetic construct
  source 1..94: mol_type = other RNA
ttcaccaggaacatgtatacctgggggaaagccagagtcgggggaccccattcagcctccaaagaggctttgctgtgtgcacccaggatcccac

SEQ ID NO: 28675 - RNA, 94 nt, synthetic construct
  source 1..94: mol_type = other RNA
ttcaccaggaacatgtacacctgggggaaagccagagtcgggggaccccattcagcctccaaagaggctttgctgtgtgcacccaggatcccac

SEQ ID NO: 28676 - RNA, 95 nt, synthetic construct
  source 1..95: mol_type = other RNA
tttcaccaggaacatgtagacctgggggaaagccagagtcgggggaccccattcagcctccaaagaggctttgctgtgtgcacccaggatcccac

SEQ ID NO: 28677 - RNA, 95 nt, synthetic construct
  source 1..95: mol_type = other RNA
tttcaccaggaacatgtatacctgggggaaagccagagtcgggggaccccattcagcctccaaagaggctttgctgtgtgcacccaggatcccac

SEQ ID NO: 28678 - RNA, 95 nt, synthetic construct
  source 1..95: mol_type = other RNA
tttcaccaggaacatgtaaacctgggggaaagccagagtcgggggaccccattcagcctccaaagaggctttgctgtgtgcacccaggatcccac

SEQ ID NO: 28679 - RNA, 95 nt, synthetic construct
  source 1..95: mol_type = other RNA
tttcaccaggaacatgtacacctgggggaaagccagagtcgggggaccccattcagcctccaaagaggctttgctgtgtgcacccaggatcccac

SEQ ID NO: 28680 - RNA, 96 nt, synthetic construct
  source 1..96: mol_type = other RNA
atttcaccaggaacatgtagacctgggggaaagccagagtcgggggaccccattcagcctccaaagaggctttgctgtgtgcacccaggatcccac

SEQ ID NO: 28681 - RNA, 96 nt, synthetic construct
  source 1..96: mol_type = other RNA
atttcaccaggaacatgtatacctgggggaaagccagagtcgggggaccccattcagcctccaaagaggctttgctgtgtgcacccaggatcccac

SEQ ID NO: 28682 - RNA, 96 nt, synthetic construct
  source 1..96: mol_type = other RNA
atttcaccaggaacatgtaaacctgggggaaagccagagtcgggggaccccattcagcctccaaagaggctttgctgtgtgcacccaggatcccac

SEQ ID NO: 28683 - RNA, 96 nt, synthetic construct
  source 1..96: mol_type = other RNA
atttcaccaggaacatgtacacctgggggaaagccagagtcgggggaccccattcagcctccaaagaggctttgctgtgtgcacccaggatcccac

SEQ ID NO: 28684 - RNA, 97 nt, synthetic construct
  source 1..97: mol_type = other RNA
catttcaccaggaacatgtaaacctgggggaaagccagagtcgggggaccccattcagcctccaaagaggctttgctgtgtgcacccaggatcccac

SEQ ID NO: 28685 - RNA, 97 nt, synthetic construct
  source 1..97: mol_type = other RNA
catttcaccaggaacatgtacacctgggggaaagccagagtcgggggaccccattcagcctccaaagaggctttgctgtgtgcacccaggatcccac

SEQ ID NO: 28686 - RNA, 97 nt, synthetic construct
  source 1..97: mol_type = other RNA
catttcaccaggaacatgtagacctgggggaaagccagagtcgggggaccccattcagcctccaaagaggctttgctgtgtgcacccaggatcccac

SEQ ID NO: 28687 - RNA, 97 nt, synthetic construct
  source 1..97: mol_type = other RNA
catttcaccaggaacatgtatacctgggggaaagccagagtcgggggaccccattcagcctccaaagaggctttgctgtgtgcacccaggatcccac

SEQ ID NO: 28688 - RNA, 98 nt, synthetic construct
  source 1..98: mol_type = other RNA
ccatttcaccaggaacatgtagacctgggggaaagccagagtcgggggaccccattcagcctccaaagaggctttgctgtgtgcacccaggatcccac

SEQ ID NO: 28689 - RNA, 98 nt, synthetic construct
  source 1..98: mol_type = other RNA
ccatttcaccaggaacatgtaaacctgggggaaagccagagtcgggggaccccattcagcctccaaagaggctttgctgtgtgcacccaggatcccac

SEQ ID NO: 28690 - RNA, 98 nt, synthetic construct
  source 1..98: mol_type = other RNA
ccatttcaccaggaacatgtatacctgggggaaagccagagtcgggggaccccattcagcctccaaagaggctttgctgtgtgcacccaggatcccac

SEQ ID NO: 28691 - RNA, 98 nt, synthetic construct
  source 1..98: mol_type = other RNA
ccatttcaccaggaacatgtacacctgggggaaagccagagtcgggggaccccattcagcctccaaagaggctttgctgtgtgcacccaggatcccac

SEQ ID NO: 28692 - RNA, 99 nt, synthetic construct
  source 1..99: mol_type = other RNA
gccatttcaccaggaacatgtatacctgggggaaagccagagtcgggggaccccattcagcctccaaagaggctttgctgtgtgcacccaggatcccac

SEQ ID NO: 28693 - RNA, 99 nt, synthetic construct
  source 1..99: mol_type = other RNA
gccatttcaccaggaacatgtacacctgggggaaagccagagtcgggggaccccattcagcctccaaagaggctttgctgtgtgcacccaggatcccac

SEQ ID NO: 28694 - RNA, 99 nt, synthetic construct
  source 1..99: mol_type = other RNA
gccatttcaccaggaacatgtaaacctgggggaaagccagagtcgggggaccccattcagcctccaaagaggctttgctgtgtgcacccaggatcccac

SEQ ID NO: 28695 - RNA, 99 nt, synthetic construct
  source 1..99: mol_type = other RNA
gccatttcaccaggaacatgtagacctgggggaaagccagagtcgggggaccccattcagcctccaaagaggctttgctgtgtgcacccaggatcccac

SEQ ID NO: 28696 - RNA, 100 nt, synthetic construct
  source 1..100: mol_type = other RNA
tgccatttcaccaggaacatgtaaacctgggggaaagccagagtcgggggaccccattcagcctccaaagaggctttgctgtgtgcacccaggatcccac

SEQ ID NO: 28697 - RNA, 100 nt, synthetic construct
  source 1..100: mol_type = other RNA
tgccatttcaccaggaacatgtacacctgggggaaagccagagtcgggggaccccattcagcctccaaagaggctttgctgtgtgcacccaggatcccac

SEQ ID NO: 28698 - RNA, 100 nt, synthetic construct
  source 1..100: mol_type = other RNA
tgccatttcaccaggaacatgtagacctgggggaaagccagagtcgggggaccccattcagcctccaaagaggctttgctgtgtgcacccaggatcccac

SEQ ID NO: 28699 - RNA, 100 nt, synthetic construct
  source 1..100: mol_type = other RNA
tgccatttcaccaggaacatgtatacctgggggaaagccagagtcgggggaccccattcagcctccaaagaggctttgctgtgtgcacccaggatcccac

SEQ ID NO: 28700 - RNA, 101 nt, synthetic construct
  source 1..101: mol_type = other RNA
ctgccatttcaccaggaacatgtaaacctgggggaaagccagagtcgggggaccccattcagcctccaaagaggctttgctgtgtgcacccaggatcccac

SEQ ID NO: 28701 - RNA, 101 nt, synthetic construct
  source 1..101: mol_type = other RNA
ctgccatttcaccaggaacatgtacacctgggggaaagccagagtcgggggaccccattcagcctccaaagaggctttgctgtgtgcacccaggatcccac

SEQ ID NO: 28702 - RNA, 101 nt, synthetic construct
  source 1..101: mol_type = other RNA
ctgccatttcaccaggaacatgtagacctgggggaaagccagagtcgggggaccccattcagcctccaaagaggctttgctgtgtgcacccaggatcccac

SEQ ID NO: 28703 - RNA, 101 nt, synthetic construct
  source 1..101: mol_type = other RNA
ctgccatttcaccaggaacatgtatacctgggggaaagccagagtcgggggaccccattcagcctccaaagaggctttgctgtgtgcacccaggatcccac

SEQ ID NO: 28704 - RNA, 102 nt, synthetic construct
  source 1..102: mol_type = other RNA
cctgccatttcaccaggaacatgtaaacctgggggaaagccagagtcgggggaccccattcagcctccaaagaggctttgctgtgtgcacccaggatcccac

SEQ ID NO: 28705 - RNA, 102 nt, synthetic construct
  source 1..102: mol_type = other RNA
cctgccatttcaccaggaacatgtacacctgggggaaagccagagtcgggggaccccattcagcctccaaagaggctttgctgtgtgcacccaggatcccac

SEQ ID NO: 28706 - RNA, 102 nt, synthetic construct
  source 1..102: mol_type = other RNA
cctgccatttcaccaggaacatgtagacctgggggaaagccagagtcgggggaccccattcagcctccaaagaggctttgctgtgtgcacccaggatcccac

SEQ ID NO: 28707 - RNA, 102 nt, synthetic construct
  source 1..102: mol_type = other RNA
cctgccatttcaccaggaacatgtatacctgggggaaagccagagtcgggggaccccattcagcctccaaagaggctttgctgtgtgcacccaggatcccac

SEQ ID NO: 28708 - RNA, 103 nt, synthetic construct
  source 1..103: mol_type = other RNA
tcctgccatttcaccaggaacatgtacacctgggggaaagccagagtcgggggaccccattcagcctccaaagaggctttgctgtgtgcacccaggatcccac

SEQ ID NO: 28709 - RNA, 103 nt, synthetic construct
  source 1..103: mol_type = other RNA
tcctgccatttcaccaggaacatgtaaacctgggggaaagccagagtcgggggaccccattcagcctccaaagaggctttgctgtgtgcacccaggatcccac

SEQ ID NO: 28710 - RNA, 103 nt, synthetic construct
  source 1..103: mol_type = other RNA
tcctgccatttcaccaggaacatgtatacctgggggaaagccagagtcgggggaccccattcagcctccaaagaggctttgctgtgtgcacccaggatcccac

SEQ ID NO: 28711 - RNA, 103 nt, synthetic construct
  source 1..103: mol_type = other RNA
tcctgccatttcaccaggaacatgtagacctgggggaaagccagagtcgggggaccccattcagcctccaaagaggctttgctgtgtgcacccaggatcccac

SEQ ID NO: 28712 - RNA, 16 nt, synthetic construct
  source 1..16: mol_type = other RNA
tgggtgcacacagcaa

SEQ ID NO: 28713 - RNA, 17 nt, synthetic construct
  source 1..17: mol_type = other RNA
ctgggtgcacacagcaa

SEQ ID NO: 28714 - RNA, 18 nt, synthetic construct
  source 1..18: mol_type = other RNA
cctgggtgcacacagcaa

SEQ ID NO: 28715 - RNA, 19 nt, synthetic construct
  source 1..19: mol_type = other RNA
tcctgggtgcacacagcaa

SEQ ID NO: 28716 - RNA, 20 nt, synthetic construct
  source 1..20: mol_type = other RNA
atcctgggtgcacacagcaa

SEQ ID NO: 28717 - RNA, 21 nt, synthetic construct
  source 1..21: mol_type = other RNA
gatcctgggtgcacacagcaa

SEQ ID NO: 28718 - RNA, 22 nt, synthetic construct
  source 1..22: mol_type = other RNA
ggatcctgggtgcacacagcaa

SEQ ID NO: 28719-28725 - skipped (7 entries)

SEQ ID NO: 28726 - RNA, 10 nt, synthetic construct
  source 1..10: mol_type = other RNA
ctgtgtgcac

SEQ ID NO: 28727 - RNA, 11 nt, synthetic construct
  source 1..11: mol_type = other RNA
ctgtgtgcacc

SEQ ID NO: 28728 - RNA, 12 nt, synthetic construct
  source 1..12: mol_type = other RNA
ctgtgtgcaccc

SEQ ID NO: 28729 - RNA, 13 nt, synthetic construct
  source 1..13: mol_type = other RNA
ctgtgtgcaccca

SEQ ID NO: 28730 - RNA, 14 nt, synthetic construct
  source 1..14: mol_type = other RNA
ctgtgtgcacccag

SEQ ID NO: 28731 - RNA, 15 nt, synthetic construct
  source 1..15: mol_type = other RNA
ctgtgtgcacccagg

SEQ ID NO: 28732 - RNA, 16 nt, synthetic construct
  source 1..16: mol_type = other RNA
ctgtgtgcacccagga

SEQ ID NO: 28733 - RNA, 17 nt, synthetic construct
  source 1..17: mol_type = other RNA
ctgtgtgcacccaggat

SEQ ID NO: 28734 - RNA, 18 nt, synthetic construct
  source 1..18: mol_type = other RNA
ctgtgtgcacccaggatc

SEQ ID NO: 28735 - RNA, 19 nt, synthetic construct
  source 1..19: mol_type = other RNA
ctgtgtgcacccaggatcc

SEQ ID NO: 28736 - RNA, 54 nt, synthetic construct
  source 1..54: mol_type = other RNA
acctgggggaaagccagagtcgggggaccccattcagcctccaaagaggctttg

SEQ ID NO: 28737 - RNA, 55 nt, synthetic construct
  source 1..55: mol_type = other RNA
tacctgggggaaagccagagtcgggggaccccattcagcctccaaagaggctttg

SEQ ID NO: 28738 - RNA, 55 nt, synthetic construct
  source 1..55: mol_type = other RNA
aacctgggggaaagccagagtcgggggaccccattcagcctccaaagaggctttg

SEQ ID NO: 28739 - RNA, 55 nt, synthetic construct
  source 1..55: mol_type = other RNA
cacctgggggaaagccagagtcgggggaccccattcagcctccaaagaggctttg

SEQ ID NO: 28740 - RNA, 55 nt, synthetic construct
  source 1..55: mol_type = other RNA
gacctgggggaaagccagagtcgggggaccccattcagcctccaaagaggctttg

SEQ ID NO: 28741 - RNA, 56 nt, synthetic construct
  source 1..56: mol_type = other RNA
agacctgggggaaagccagagtcgggggaccccattcagcctccaaagaggctttg

SEQ ID NO: 28742 - RNA, 56 nt, synthetic construct
  source 1..56: mol_type = other RNA
acacctgggggaaagccagagtcgggggaccccattcagcctccaaagaggctttg

SEQ ID NO: 28743 - RNA, 56 nt, synthetic construct
  source 1..56: mol_type = other RNA
aaacctgggggaaagccagagtcgggggaccccattcagcctccaaagaggctttg

SEQ ID NO: 28744 - RNA, 56 nt, synthetic construct
  source 1..56: mol_type = other RNA
atacctgggggaaagccagagtcgggggaccccattcagcctccaaagaggctttg

SEQ ID NO: 28745 - RNA, 57 nt, synthetic construct
  source 1..57: mol_type = other RNA
tagacctgggggaaagccagagtcgggggaccccattcagcctccaaagaggctttg

SEQ ID NO: 28746 - RNA, 57 nt, synthetic construct
  source 1..57: mol_type = other RNA
tacacctgggggaaagccagagtcgggggaccccattcagcctccaaagaggctttg

SEQ ID NO: 28747 - RNA, 57 nt, synthetic construct
  source 1..57: mol_type = other RNA
taaacctgggggaaagccagagtcgggggaccccattcagcctccaaagaggctttg

SEQ ID NO: 28748 - RNA, 57 nt, synthetic construct
  source 1..57: mol_type = other RNA
tatacctgggggaaagccagagtcgggggaccccattcagcctccaaagaggctttg

SEQ ID NO: 28749 - RNA, 58 nt, synthetic construct
  source 1..58: mol_type = other RNA
gtacacctgggggaaagccagagtcgggggaccccattcagcctccaaagaggctttg

SEQ ID NO: 28750 - RNA, 58 nt, synthetic construct
  source 1..58: mol_type = other RNA
gtatacctgggggaaagccagagtcgggggaccccattcagcctccaaagaggctttg

SEQ ID NO: 28751 - RNA, 58 nt, synthetic construct
  source 1..58: mol_type = other RNA
gtaaacctgggggaaagccagagtcgggggaccccattcagcctccaaagaggctttg

SEQ ID NO: 28752 - RNA, 58 nt, synthetic construct
  source 1..58: mol_type = other RNA
gtagacctgggggaaagccagagtcgggggaccccattcagcctccaaagaggctttg

SEQ ID NO: 28753 - RNA, 59 nt, synthetic construct
  source 1..59: mol_type = other RNA
tgtagacctgggggaaagccagagtcgggggaccccattcagcctccaaagaggctttg

SEQ ID NO: 28754 - RNA, 59 nt, synthetic construct
  source 1..59: mol_type = other RNA
tgtatacctgggggaaagccagagtcgggggaccccattcagcctccaaagaggctttg

SEQ ID NO: 28755 - RNA, 59 nt, synthetic construct
  source 1..59: mol_type = other RNA
tgtacacctgggggaaagccagagtcgggggaccccattcagcctccaaagaggctttg

SEQ ID NO: 28756 - RNA, 59 nt, synthetic construct
  source 1..59: mol_type = other RNA
tgtaaacctgggggaaagccagagtcgggggaccccattcagcctccaaagaggctttg

SEQ ID NO: 28757 - RNA, 60 nt, synthetic construct
  source 1..60: mol_type = other RNA
atgtagacctgggggaaagccagagtcgggggaccccattcagcctccaaagaggctttg

SEQ ID NO: 28758 - RNA, 60 nt, synthetic construct
  source 1..60: mol_type = other RNA
atgtaaacctgggggaaagccagagtcgggggaccccattcagcctccaaagaggctttg

SEQ ID NO: 28759 - RNA, 60 nt, synthetic construct
  source 1..60: mol_type = other RNA
atgtatacctgggggaaagccagagtcgggggaccccattcagcctccaaagaggctttg

SEQ ID NO: 28760 - RNA, 60 nt, synthetic construct
  source 1..60: mol_type = other RNA
atgtacacctgggggaaagccagagtcgggggaccccattcagcctccaaagaggctttg

SEQ ID NO: 28761 - RNA, 61 nt, synthetic construct
  source 1..61: mol_type = other RNA
catgtatacctgggggaaagccagagtcgggggaccccattcagcctccaaagaggctttg

SEQ ID NO: 28762 - RNA, 61 nt, synthetic construct
  source 1..61: mol_type = other RNA
catgtacacctgggggaaagccagagtcgggggaccccattcagcctccaaagaggctttg

SEQ ID NO: 28763 - RNA, 61 nt, synthetic construct
  source 1..61: mol_type = other RNA
catgtagacctgggggaaagccagagtcgggggaccccattcagcctccaaagaggctttg

SEQ ID NO: 28764 - RNA, 61 nt, synthetic construct
  source 1..61: mol_type = other RNA
catgtaaacctgggggaaagccagagtcgggggaccccattcagcctccaaagaggctttg

SEQ ID NO: 28765 - RNA, 62 nt, synthetic construct
  source 1..62: mol_type = other RNA
acatgtatacctgggggaaagccagagtcgggggaccccattcagcctccaaagaggctttg

SEQ ID NO: 28766 - RNA, 62 nt, synthetic construct
  source 1..62: mol_type = other RNA
acatgtacacctgggggaaagccagagtcgggggaccccattcagcctccaaagaggctttg

SEQ ID NO: 28767 - RNA, 62 nt, synthetic construct
  source 1..62: mol_type = other RNA
acatgtaaacctgggggaaagccagagtcgggggaccccattcagcctccaaagaggctttg

SEQ ID NO: 28768 - RNA, 62 nt, synthetic construct
  source 1..62: mol_type = other RNA
acatgtagacctgggggaaagccagagtcgggggaccccattcagcctccaaagaggctttg

SEQ ID NO: 28769 - RNA, 63 nt, synthetic construct
  source 1..63: mol_type = other RNA
aacatgtagacctgggggaaagccagagtcgggggaccccattcagcctccaaagaggctttg

SEQ ID NO: 28770 - RNA, 63 nt, synthetic construct
  source 1..63: mol_type = other RNA
aacatgtatacctgggggaaagccagagtcgggggaccccattcagcctccaaagaggctttg

SEQ ID NO: 28771 - RNA, 63 nt, synthetic construct
  source 1..63: mol_type = other RNA
aacatgtacacctgggggaaagccagagtcgggggaccccattcagcctccaaagaggctttg

SEQ ID NO: 28772 - RNA, 63 nt, synthetic construct
  source 1..63: mol_type = other RNA
aacatgtaaacctgggggaaagccagagtcgggggaccccattcagcctccaaagaggctttg

SEQ ID NO: 28773 - RNA, 64 nt, synthetic construct
  source 1..64: mol_type = other RNA
gaacatgtagacctgggggaaagccagagtcgggggaccccattcagcctccaaagaggctttg

SEQ ID NO: 28774 - RNA, 64 nt, synthetic construct
  source 1..64: mol_type = other RNA
gaacatgtaaacctgggggaaagccagagtcgggggaccccattcagcctccaaagaggctttg

SEQ ID NO: 28775 - RNA, 64 nt, synthetic construct
  source 1..64: mol_type = other RNA
gaacatgtatacctgggggaaagccagagtcgggggaccccattcagcctccaaagaggctttg

SEQ ID NO: 28776 - RNA, 64 nt, synthetic construct
  source 1..64: mol_type = other RNA
gaacatgtacacctgggggaaagccagagtcgggggaccccattcagcctccaaagaggctttg

SEQ ID NO: 28777 - RNA, 65 nt, synthetic construct
  source 1..65: mol_type = other RNA
ggaacatgtagacctgggggaaagccagagtcgggggaccccattcagcctccaaagaggctttg

SEQ ID NO: 28778 - RNA, 65 nt, synthetic construct
  source 1..65: mol_type = other RNA
ggaacatgtaaacctgggggaaagccagagtcgggggaccccattcagcctccaaagaggctttg

SEQ ID NO: 28779 - RNA, 65 nt, synthetic construct
  source 1..65: mol_type = other RNA
ggaacatgtacacctgggggaaagccagagtcgggggaccccattcagcctccaaagaggctttg

SEQ ID NO: 28780 - RNA, 65 nt, synthetic construct
  source 1..65: mol_type = other RNA
ggaacatgtatacctgggggaaagccagagtcgggggaccccattcagcctccaaagaggctttg

SEQ ID NO: 28781 - RNA, 66 nt, synthetic construct
  source 1..66: mol_type = other RNA
aggaacatgtacacctgggggaaagccagagtcgggggaccccattcagcctccaaagaggctttg

SEQ ID NO: 28782 - RNA, 66 nt, synthetic construct
  source 1..66: mol_type = other RNA
aggaacatgtaaacctgggggaaagccagagtcgggggaccccattcagcctccaaagaggctttg

SEQ ID NO: 28783 - RNA, 66 nt, synthetic construct
  source 1..66: mol_type = other RNA
aggaacatgtatacctgggggaaagccagagtcgggggaccccattcagcctccaaagaggctttg

SEQ ID NO: 28784 - RNA, 66 nt, synthetic construct
  source 1..66: mol_type = other RNA
aggaacatgtagacctgggggaaagccagagtcgggggaccccattcagcctccaaagaggctttg

SEQ ID NO: 28785 - RNA, 67 nt, synthetic construct
  source 1..67: mol_type = other RNA
caggaacatgtaaacctgggggaaagccagagtcgggggaccccattcagcctccaaagaggctttg

SEQ ID NO: 28786 - RNA, 67 nt, synthetic construct
  source 1..67: mol_type = other RNA
caggaacatgtacacctgggggaaagccagagtcgggggaccccattcagcctccaaagaggctttg

SEQ ID NO: 28787 - RNA, 67 nt, synthetic construct
  source 1..67: mol_type = other RNA
caggaacatgtatacctgggggaaagccagagtcgggggaccccattcagcctccaaagaggctttg

SEQ ID NO: 28788 - RNA, 67 nt, synthetic construct
  source 1..67: mol_type = other RNA
caggaacatgtagacctgggggaaagccagagtcgggggaccccattcagcctccaaagaggctttg

SEQ ID NO: 28789 - RNA, 68 nt, synthetic construct
  source 1..68: mol_type = other RNA
ccaggaacatgtaaacctgggggaaagccagagtcgggggaccccattcagcctccaaagaggctttg

SEQ ID NO: 28790 - RNA, 68 nt, synthetic construct
  source 1..68: mol_type = other RNA
ccaggaacatgtatacctgggggaaagccagagtcgggggaccccattcagcctccaaagaggctttg

SEQ ID NO: 28791 - RNA, 68 nt, synthetic construct
  source 1..68: mol_type = other RNA
ccaggaacatgtagacctgggggaaagccagagtcgggggaccccattcagcctccaaagaggctttg

SEQ ID NO: 28792 - RNA, 68 nt, synthetic construct
  source 1..68: mol_type = other RNA
ccaggaacatgtacacctgggggaaagccagagtcgggggaccccattcagcctccaaagaggctttg

SEQ ID NO: 28793 - RNA, 69 nt, synthetic construct
  source 1..69: mol_type = other RNA
accaggaacatgtatacctgggggaaagccagagtcgggggaccccattcagcctccaaagaggctttg

SEQ ID NO: 28794 - RNA, 69 nt, synthetic construct
  source 1..69: mol_type = other RNA
accaggaacatgtaaacctgggggaaagccagagtcgggggaccccattcagcctccaaagaggctttg

SEQ ID NO: 28795 - RNA, 69 nt, synthetic construct
  source 1..69: mol_type = other RNA
accaggaacatgtagacctgggggaaagccagagtcgggggaccccattcagcctccaaagaggctttg

SEQ ID NO: 28796 - RNA, 69 nt, synthetic construct
  source 1..69: mol_type = other RNA
accaggaacatgtacacctgggggaaagccagagtcgggggaccccattcagcctccaaagaggctttg

SEQ ID NO: 28797 - RNA, 70 nt, synthetic construct
  source 1..70: mol_type = other RNA
caccaggaacatgtacacctgggggaaagccagagtcgggggaccccattcagcctccaaagaggctttg

SEQ ID NO: 28798 - RNA, 70 nt, synthetic construct
  source 1..70: mol_type = other RNA
caccaggaacatgtaaacctgggggaaagccagagtcgggggaccccattcagcctccaaagaggctttg

SEQ ID NO: 28799 - RNA, 70 nt, synthetic construct
  source 1..70: mol_type = other RNA
caccaggaacatgtatacctgggggaaagccagagtcgggggaccccattcagcctccaaagaggctttg

SEQ ID NO: 28800 - RNA, 70 nt, synthetic construct
  source 1..70: mol_type = other RNA
caccaggaacatgtagacctgggggaaagccagagtcgggggaccccattcagcctccaaagaggctttg

SEQ ID NO: 28801 - RNA, 71 nt, synthetic construct
  source 1..71: mol_type = other RNA
tcaccaggaacatgtacacctgggggaaagccagagtcgggggaccccattcagcctccaaagaggctttg

SEQ ID NO: 28802 - RNA, 71 nt, synthetic construct
  source 1..71: mol_type = other RNA
tcaccaggaacatgtagacctgggggaaagccagagtcgggggaccccattcagcctccaaagaggctttg

SEQ ID NO: 28803 - RNA, 71 nt, synthetic construct
  source 1..71: mol_type = other RNA
tcaccaggaacatgtatacctgggggaaagccagagtcgggggaccccattcagcctccaaagaggctttg

SEQ ID NO: 28804 - RNA, 71 nt, synthetic construct
  source 1..71: mol_type = other RNA
tcaccaggaacatgtaaacctgggggaaagccagagtcgggggaccccattcagcctccaaagaggctttg

SEQ ID NO: 28805 - RNA, 72 nt, synthetic construct
  source 1..72: mol_type = other RNA
ttcaccaggaacatgtaaacctgggggaaagccagagtcgggggaccccattcagcctccaaagaggctttg

SEQ ID NO: 28806 - RNA, 72 nt, synthetic construct
  source 1..72: mol_type = other RNA
ttcaccaggaacatgtacacctgggggaaagccagagtcgggggaccccattcagcctccaaagaggctttg

SEQ ID NO: 28807 - RNA, 72 nt, synthetic construct
  source 1..72: mol_type = other RNA
ttcaccaggaacatgtatacctgggggaaagccagagtcgggggaccccattcagcctccaaagaggctttg

SEQ ID NO: 28808 - RNA, 72 nt, synthetic construct
  source 1..72: mol_type = other RNA
ttcaccaggaacatgtagacctgggggaaagccagagtcgggggaccccattcagcctccaaagaggctttg

SEQ ID NO: 28809 - RNA, 73 nt, synthetic construct
  source 1..73: mol_type = other RNA
tttcaccaggaacatgtatacctgggggaaagccagagtcgggggaccccattcagcctccaaagaggctttg

SEQ ID NO: 28810 - RNA, 73 nt, synthetic construct
  source 1..73: mol_type = other RNA
tttcaccaggaacatgtacacctgggggaaagccagagtcgggggaccccattcagcctccaaagaggctttg

SEQ ID NO: 28811 - RNA, 73 nt, synthetic construct
  source 1..73: mol_type = other RNA
tttcaccaggaacatgtagacctgggggaaagccagagtcgggggaccccattcagcctccaaagaggctttg

SEQ ID NO: 28812 - RNA, 73 nt, synthetic construct
  source 1..73: mol_type = other RNA
tttcaccaggaacatgtaaacctgggggaaagccagagtcgggggaccccattcagcctccaaagaggctttg

SEQ ID NO: 28813 - RNA, 74 nt, synthetic construct
  source 1..74: mol_type = other RNA
atttcaccaggaacatgtaaacctgggggaaagccagagtcgggggaccccattcagcctccaaagaggctttg

SEQ ID NO: 28814 - RNA, 74 nt, synthetic construct
  source 1..74: mol_type = other RNA
atttcaccaggaacatgtagacctgggggaaagccagagtcgggggaccccattcagcctccaaagaggctttg

SEQ ID NO: 28815 - RNA, 74 nt, synthetic construct
  source 1..74: mol_type = other RNA
atttcaccaggaacatgtatacctgggggaaagccagagtcgggggaccccattcagcctccaaagaggctttg

SEQ ID NO: 28816 - RNA, 74 nt, synthetic construct
  source 1..74: mol_type = other RNA
atttcaccaggaacatgtacacctgggggaaagccagagtcgggggaccccattcagcctccaaagaggctttg

SEQ ID NO: 28817 - RNA, 75 nt, synthetic construct
  source 1..75: mol_type = other RNA
catttcaccaggaacatgtatacctgggggaaagccagagtcgggggaccccattcagcctccaaagaggctttg

SEQ ID NO: 28818 - RNA, 75 nt, synthetic construct
  source 1..75: mol_type = other RNA
catttcaccaggaacatgtagacctgggggaaagccagagtcgggggaccccattcagcctccaaagaggctttg

SEQ ID NO: 28819 - RNA, 75 nt, synthetic construct
  source 1..75: mol_type = other RNA
catttcaccaggaacatgtaaacctgggggaaagccagagtcgggggaccccattcagcctccaaagaggctttg

SEQ ID NO: 28820 - RNA, 75 nt, synthetic construct
  source 1..75: mol_type = other RNA
catttcaccaggaacatgtacacctgggggaaagccagagtcgggggaccccattcagcctccaaagaggctttg

SEQ ID NO: 28821 - RNA, 76 nt, synthetic construct
  source 1..76: mol_type = other RNA
ccatttcaccaggaacatgtaaacctgggggaaagccagagtcgggggaccccattcagcctccaaagaggctttg

SEQ ID NO: 28822 - RNA, 76 nt, synthetic construct
  source 1..76: mol_type = other RNA
ccatttcaccaggaacatgtacacctgggggaaagccagagtcgggggaccccattcagcctccaaagaggctttg

SEQ ID NO: 28823 - RNA, 76 nt, synthetic construct
  source 1..76: mol_type = other RNA
ccatttcaccaggaacatgtagacctgggggaaagccagagtcgggggaccccattcagcctccaaagaggctttg

SEQ ID NO: 28824 - RNA, 76 nt, synthetic construct
  source 1..76: mol_type = other RNA
ccatttcaccaggaacatgtatacctgggggaaagccagagtcgggggaccccattcagcctccaaagaggctttg

SEQ ID NO: 28825 - RNA, 77 nt, synthetic construct
  source 1..77: mol_type = other RNA
gccatttcaccaggaacatgtatacctgggggaaagccagagtcgggggaccccattcagcctccaaagaggctttg

SEQ ID NO: 28826 - RNA, 77 nt, synthetic construct
  source 1..77: mol_type = other RNA
gccatttcaccaggaacatgtaaacctgggggaaagccagagtcgggggaccccattcagcctccaaagaggctttg

SEQ ID NO: 28827 - RNA, 77 nt, synthetic construct
  source 1..77: mol_type = other RNA
gccatttcaccaggaacatgtacacctgggggaaagccagagtcgggggaccccattcagcctccaaagaggctttg

SEQ ID NO: 28828 - RNA, 77 nt, synthetic construct
  source 1..77: mol_type = other RNA
gccatttcaccaggaacatgtagacctgggggaaagccagagtcgggggaccccattcagcctccaaagaggctttg

SEQ ID NO: 28829 - RNA, 78 nt, synthetic construct
  source 1..78: mol_type = other RNA
tgccatttcaccaggaacatgtaaacctgggggaaagccagagtcgggggaccccattcagcctccaaagaggctttg

SEQ ID NO: 28830 - RNA, 78 nt, synthetic construct
  source 1..78: mol_type = other RNA
tgccatttcaccaggaacatgtacacctgggggaaagccagagtcgggggaccccattcagcctccaaagaggctttg

SEQ ID NO: 28831 - RNA, 78 nt, synthetic construct
  source 1..78: mol_type = other RNA
tgccatttcaccaggaacatgtagacctgggggaaagccagagtcgggggaccccattcagcctccaaagaggctttg

SEQ ID NO: 28832 - RNA, 78 nt, synthetic construct
  source 1..78: mol_type = other RNA
tgccatttcaccaggaacatgtatacctgggggaaagccagagtcgggggaccccattcagcctccaaagaggctttg

SEQ ID NO: 28833 - RNA, 79 nt, synthetic construct
  source 1..79: mol_type = other RNA
ctgccatttcaccaggaacatgtagacctgggggaaagccagagtcgggggaccccattcagcctccaaagaggctttg

SEQ ID NO: 28834 - RNA, 79 nt, synthetic construct
  source 1..79: mol_type = other RNA
ctgccatttcaccaggaacatgtatacctgggggaaagccagagtcgggggaccccattcagcctccaaagaggctttg

SEQ ID NO: 28835 - RNA, 79 nt, synthetic construct
  source 1..79: mol_type = other RNA
ctgccatttcaccaggaacatgtaaacctgggggaaagccagagtcgggggaccccattcagcctccaaagaggctttg

SEQ ID NO: 28836 - RNA, 79 nt, synthetic construct
  source 1..79: mol_type = other RNA
ctgccatttcaccaggaacatgtacacctgggggaaagccagagtcgggggaccccattcagcctccaaagaggctttg

SEQ ID NO: 28837 - RNA, 80 nt, synthetic construct
  source 1..80: mol_type = other RNA
cctgccatttcaccaggaacatgtaaacctgggggaaagccagagtcgggggaccccattcagcctccaaagaggctttg

SEQ ID NO: 28838 - RNA, 80 nt, synthetic construct
  source 1..80: mol_type = other RNA
cctgccatttcaccaggaacatgtacacctgggggaaagccagagtcgggggaccccattcagcctccaaagaggctttg

SEQ ID NO: 28839 - RNA, 80 nt, synthetic construct
  source 1..80: mol_type = other RNA
cctgccatttcaccaggaacatgtagacctgggggaaagccagagtcgggggaccccattcagcctccaaagaggctttg

SEQ ID NO: 28840 - RNA, 80 nt, synthetic construct
  source 1..80: mol_type = other RNA
cctgccatttcaccaggaacatgtatacctgggggaaagccagagtcgggggaccccattcagcctccaaagaggctttg

SEQ ID NO: 28841 - RNA, 81 nt, synthetic construct
  source 1..81: mol_type = other RNA
tcctgccatttcaccaggaacatgtaaacctgggggaaagccagagtcgggggaccccattcagcctccaaagaggctttg

SEQ ID NO: 28842 - RNA, 81 nt, synthetic construct
  source 1..81: mol_type = other RNA
tcctgccatttcaccaggaacatgtacacctgggggaaagccagagtcgggggaccccattcagcctccaaagaggctttg

SEQ ID NO: 28843 - RNA, 81 nt, synthetic construct
  source 1..81: mol_type = other RNA
tcctgccatttcaccaggaacatgtagacctgggggaaagccagagtcgggggaccccattcagcctccaaagaggctttg

SEQ ID NO: 28844 - RNA, 81 nt, synthetic construct
  source 1..81: mol_type = other RNA
tcctgccatttcaccaggaacatgtatacctgggggaaagccagagtcgggggaccccattcagcctccaaagaggctttg

SEQ ID NO: 28845 - RNA, 82 nt, synthetic construct
  source 1..82: mol_type = other RNA
gtcctgccatttcaccaggaacatgtagacctgggggaaagccagagtcgggggaccccattcagcctccaaagaggctttg

SEQ ID NO: 28846 - RNA, 82 nt, synthetic construct
  source 1..82: mol_type = other RNA
gtcctgccatttcaccaggaacatgtaaacctgggggaaagccagagtcgggggaccccattcagcctccaaagaggctttg

SEQ ID NO: 28847 - RNA, 82 nt, synthetic construct
  source 1..82: mol_type = other RNA
gtcctgccatttcaccaggaacatgtacacctgggggaaagccagagtcgggggaccccattcagcctccaaagaggctttg

SEQ ID NO: 28848 - RNA, 82 nt, synthetic construct
  source 1..82: mol_type = other RNA
gtcctgccatttcaccaggaacatgtatacctgggggaaagccagagtcgggggaccccattcagcctccaaagaggctttg

SEQ ID NO: 28849 - RNA, 83 nt, synthetic construct
  source 1..83: mol_type = other RNA
ggtcctgccatttcaccaggaacatgtatacctgggggaaagccagagtcgggggaccccattcagcctccaaagaggctttg

SEQ ID NO: 28850 - RNA, 83 nt, synthetic construct
  source 1..83: mol_type = other RNA
ggtcctgccatttcaccaggaacatgtagacctgggggaaagccagagtcgggggaccccattcagcctccaaagaggctttg

SEQ ID NO: 28851 - RNA, 83 nt, synthetic construct
  source 1..83: mol_type = other RNA
ggtcctgccatttcaccaggaacatgtacacctgggggaaagccagagtcgggggaccccattcagcctccaaagaggctttg

SEQ ID NO: 28852 - RNA, 83 nt, synthetic construct
  source 1..83: mol_type = other RNA
ggtcctgccatttcaccaggaacatgtaaacctgggggaaagccagagtcgggggaccccattcagcctccaaagaggctttg

SEQ ID NO: 28853 - RNA, 84 nt, synthetic construct
  source 1..84: mol_type = other RNA
aggtcctgccatttcaccaggaacatgtagacctgggggaaagccagagtcgggggaccccattcagcctccaaagaggctttg

SEQ ID NO: 28854 - RNA, 84 nt, synthetic construct
  source 1..84: mol_type = other RNA
aggtcctgccatttcaccaggaacatgtaaacctgggggaaagccagagtcgggggaccccattcagcctccaaagaggctttg

SEQ ID NO: 28855 - RNA, 84 nt, synthetic construct
  source 1..84: mol_type = other RNA
aggtcctgccatttcaccaggaacatgtatacctgggggaaagccagagtcgggggaccccattcagcctccaaagaggctttg

SEQ ID NO: 28856 - RNA, 84 nt, synthetic construct
  source 1..84: mol_type = other RNA
aggtcctgccatttcaccaggaacatgtacacctgggggaaagccagagtcgggggaccccattcagcctccaaagaggctttg

SEQ ID NO: 28857 - RNA, 85 nt, synthetic construct
  source 1..85: mol_type = other RNA
caggtcctgccatttcaccaggaacatgtacacctgggggaaagccagagtcgggggaccccattcagcctccaaagaggctttg

SEQ ID NO: 28858 - RNA, 85 nt, synthetic construct
  source 1..85: mol_type = other RNA
caggtcctgccatttcaccaggaacatgtatacctgggggaaagccagagtcgggggaccccattcagcctccaaagaggctttg

SEQ ID NO: 28859 - RNA, 85 nt, synthetic construct
  source 1..85: mol_type = other RNA
caggtcctgccatttcaccaggaacatgtagacctgggggaaagccagagtcgggggaccccattcagcctccaaagaggctttg

SEQ ID NO: 28860 - RNA, 85 nt, synthetic construct
  source 1..85: mol_type = other RNA
caggtcctgccatttcaccaggaacatgtaaacctgggggaaagccagagtcgggggaccccattcagcctccaaagaggctttg

SEQ ID NO: 28861 - RNA, 86 nt, synthetic construct
  source 1..86: mol_type = other RNA
acaggtcctgccatttcaccaggaacatgtacacctgggggaaagccagagtcgggggaccccattcagcctccaaagaggctttg

SEQ ID NO: 28862 - RNA, 86 nt, synthetic construct
  source 1..86: mol_type = other RNA
acaggtcctgccatttcaccaggaacatgtagacctgggggaaagccagagtcgggggaccccattcagcctccaaagaggctttg

SEQ ID NO: 28863 - RNA, 86 nt, synthetic construct
  source 1..86: mol_type = other RNA
acaggtcctgccatttcaccaggaacatgtatacctgggggaaagccagagtcgggggaccccattcagcctccaaagaggctttg

SEQ ID NO: 28864 - RNA, 86 nt, synthetic construct
  source 1..86: mol_type = other RNA
acaggtcctgccatttcaccaggaacatgtaaacctgggggaaagccagagtcgggggaccccattcagcctccaaagaggctttg

SEQ ID NO: 28865 - RNA, 87 nt, synthetic construct
  source 1..87: mol_type = other RNA
gacaggtcctgccatttcaccaggaacatgtatacctgggggaaagccagagtcgggggaccccattcagcctccaaagaggctttg

SEQ ID NO: 28866 - RNA, 87 nt, synthetic construct
  source 1..87: mol_type = other RNA
gacaggtcctgccatttcaccaggaacatgtacacctgggggaaagccagagtcgggggaccccattcagcctccaaagaggctttg

SEQ ID NO: 28867 - RNA, 87 nt, synthetic construct
  source 1..87: mol_type = other RNA
gacaggtcctgccatttcaccaggaacatgtagacctgggggaaagccagagtcgggggaccccattcagcctccaaagaggctttg

SEQ ID NO: 28868 - RNA, 87 nt, synthetic construct
  source 1..87: mol_type = other RNA
gacaggtcctgccatttcaccaggaacatgtaaacctgggggaaagccagagtcgggggaccccattcagcctccaaagaggctttg

SEQ ID NO: 28869 - RNA, 88 nt, synthetic construct
  source 1..88: mol_type = other RNA
cgacaggtcctgccatttcaccaggaacatgtaaacctgggggaaagccagagtcgggggaccccattcagcctccaaagaggctttg

SEQ ID NO: 28870 - RNA, 88 nt, synthetic construct
  source 1..88: mol_type = other RNA
cgacaggtcctgccatttcaccaggaacatgtatacctgggggaaagccagagtcgggggaccccattcagcctccaaagaggctttg

SEQ ID NO: 28871 - RNA, 88 nt, synthetic construct
  source 1..88: mol_type = other RNA
cgacaggtcctgccatttcaccaggaacatgtacacctgggggaaagccagagtcgggggaccccattcagcctccaaagaggctttg

SEQ ID NO: 28872 - RNA, 88 nt, synthetic construct
  source 1..88: mol_type = other RNA
cgacaggtcctgccatttcaccaggaacatgtagacctgggggaaagccagagtcgggggaccccattcagcctccaaagaggctttg

SEQ ID NO: 28873 - RNA, 89 nt, synthetic construct
  source 1..89: mol_type = other RNA
ccgacaggtcctgccatttcaccaggaacatgtagacctgggggaaagccagagtcgggggaccccattcagcctccaaagaggctttg

SEQ ID NO: 28874 - RNA, 89 nt, synthetic construct
  source 1..89: mol_type = other RNA
ccgacaggtcctgccatttcaccaggaacatgtaaacctgggggaaagccagagtcgggggaccccattcagcctccaaagaggctttg

SEQ ID NO: 28875 - RNA, 89 nt, synthetic construct
  source 1..89: mol_type = other RNA
ccgacaggtcctgccatttcaccaggaacatgtacacctgggggaaagccagagtcgggggaccccattcagcctccaaagaggctttg

SEQ ID NO: 28876 - RNA, 89 nt, synthetic construct
  source 1..89: mol_type = other RNA
ccgacaggtcctgccatttcaccaggaacatgtatacctgggggaaagccagagtcgggggaccccattcagcctccaaagaggctttg

SEQ ID NO: 28877 - RNA, 90 nt, synthetic construct
  source 1..90: mol_type = other RNA
tccgacaggtcctgccatttcaccaggaacatgtatacctgggggaaagccagagtcgggggaccccattcagcctccaaagaggctttg

SEQ ID NO: 28878 - RNA, 90 nt, synthetic construct
  source 1..90: mol_type = other RNA
tccgacaggtcctgccatttcaccaggaacatgtaaacctgggggaaagccagagtcgggggaccccattcagcctccaaagaggctttg

SEQ ID NO: 28879 - RNA, 90 nt, synthetic construct
  source 1..90: mol_type = other RNA
tccgacaggtcctgccatttcaccaggaacatgtacacctgggggaaagccagagtcgggggaccccattcagcctccaaagaggctttg

SEQ ID NO: 28880 - RNA, 90 nt, synthetic construct
  source 1..90: mol_type = other RNA
tccgacaggtcctgccatttcaccaggaacatgtagacctgggggaaagccagagtcgggggaccccattcagcctccaaagaggctttg

SEQ ID NO: 28881 - RNA, 91 nt, synthetic construct
  source 1..91: mol_type = other RNA
ctccgacaggtcctgccatttcaccaggaacatgtagacctgggggaaagccagagtcgggggaccccattcagcctccaaagaggctttg

SEQ ID NO: 28882 - RNA, 91 nt, synthetic construct
  source 1..91: mol_type = other RNA
ctccgacaggtcctgccatttcaccaggaacatgtacacctgggggaaagccagagtcgggggaccccattcagcctccaaagaggctttg

SEQ ID NO: 28883 - RNA, 91 nt, synthetic construct
  source 1..91: mol_type = other RNA
ctccgacaggtcctgccatttcaccaggaacatgtaaacctgggggaaagccagagtcgggggaccccattcagcctccaaagaggctttg

SEQ ID NO: 28884 - RNA, 91 nt, synthetic construct
  source 1..91: mol_type = other RNA
ctccgacaggtcctgccatttcaccaggaacatgtatacctgggggaaagccagagtcgggggaccccattcagcctccaaagaggctttg

SEQ ID NO: 28885 - RNA, 92 nt, synthetic construct
  source 1..92: mol_type = other RNA
tctccgacaggtcctgccatttcaccaggaacatgtacacctgggggaaagccagagtcgggggaccccattcagcctccaaagaggctttg

SEQ ID NO: 28886 - RNA, 92 nt, synthetic construct
  source 1..92: mol_type = other RNA
tctccgacaggtcctgccatttcaccaggaacatgtagacctgggggaaagccagagtcgggggaccccattcagcctccaaagaggctttg

SEQ ID NO: 28887 - RNA, 92 nt, synthetic construct
  source 1..92: mol_type = other RNA
tctccgacaggtcctgccatttcaccaggaacatgtatacctgggggaaagccagagtcgggggaccccattcagcctccaaagaggctttg

SEQ ID NO: 28888 - RNA, 92 nt, synthetic construct
  source 1..92: mol_type = other RNA
tctccgacaggtcctgccatttcaccaggaacatgtaaacctgggggaaagccagagtcgggggaccccattcagcctccaaagaggctttg

SEQ ID NO: 28889 - RNA, 93 nt, synthetic construct
  source 1..93: mol_type = other RNA
ttctccgacaggtcctgccatttcaccaggaacatgtacacctgggggaaagccagagtcgggggaccccattcagcctccaaagaggctttg

SEQ ID NO: 28890 - RNA, 93 nt, synthetic construct
  source 1..93: mol_type = other RNA
ttctccgacaggtcctgccatttcaccaggaacatgtagacctgggggaaagccagagtcgggggaccccattcagcctccaaagaggctttg

SEQ ID NO: 28891 - RNA, 93 nt, synthetic construct
  source 1..93: mol_type = other RNA
ttctccgacaggtcctgccatttcaccaggaacatgtatacctgggggaaagccagagtcgggggaccccattcagcctccaaagaggctttg

SEQ ID NO: 28892 - RNA, 93 nt, synthetic construct
  source 1..93: mol_type = other RNA
ttctccgacaggtcctgccatttcaccaggaacatgtaaacctgggggaaagccagagtcgggggaccccattcagcctccaaagaggctttg

SEQ ID NO: 28893 - RNA, 94 nt, synthetic construct
  source 1..94: mol_type = other RNA
cttctccgacaggtcctgccatttcaccaggaacatgtatacctgggggaaagccagagtcgggggaccccattcagcctccaaagaggctttg

SEQ ID NO: 28894 - RNA, 94 nt, synthetic construct
  source 1..94: mol_type = other RNA
cttctccgacaggtcctgccatttcaccaggaacatgtagacctgggggaaagccagagtcgggggaccccattcagcctccaaagaggctttg

SEQ ID NO: 28895 - RNA, 94 nt, synthetic construct
  source 1..94: mol_type = other RNA
cttctccgacaggtcctgccatttcaccaggaacatgtacacctgggggaaagccagagtcgggggaccccattcagcctccaaagaggctttg

SEQ ID NO: 28896 - RNA, 94 nt, synthetic construct
  source 1..94: mol_type = other RNA
cttctccgacaggtcctgccatttcaccaggaacatgtaaacctgggggaaagccagagtcgggggaccccattcagcctccaaagaggctttg

SEQ ID NO: 28897 - RNA, 95 nt, synthetic construct
  source 1..95: mol_type = other RNA
ccttctccgacaggtcctgccatttcaccaggaacatgtaaacctgggggaaagccagagtcgggggaccccattcagcctccaaagaggctttg

SEQ ID NO: 28898 - RNA, 95 nt, synthetic construct
  source 1..95: mol_type = other RNA
ccttctccgacaggtcctgccatttcaccaggaacatgtacacctgggggaaagccagagtcgggggaccccattcagcctccaaagaggctttg

SEQ ID NO: 28899 - RNA, 95 nt, synthetic construct
  source 1..95: mol_type = other RNA
ccttctccgacaggtcctgccatttcaccaggaacatgtagacctgggggaaagccagagtcgggggaccccattcagcctccaaagaggctttg

SEQ ID NO: 28900 - RNA, 95 nt, synthetic construct
  source 1..95: mol_type = other RNA
ccttctccgacaggtcctgccatttcaccaggaacatgtatacctgggggaaagccagagtcgggggaccccattcagcctccaaagaggctttg

SEQ ID NO: 28901 - RNA, 96 nt, synthetic construct
  source 1..96: mol_type = other RNA
accttctccgacaggtcctgccatttcaccaggaacatgtatacctgggggaaagccagagtcgggggaccccattcagcctccaaagaggctttg

SEQ ID NO: 28902 - RNA, 96 nt, synthetic construct
  source 1..96: mol_type = other RNA
accttctccgacaggtcctgccatttcaccaggaacatgtagacctgggggaaagccagagtcgggggaccccattcagcctccaaagaggctttg

SEQ ID NO: 28903 - RNA, 96 nt, synthetic construct
  source 1..96: mol_type = other RNA
accttctccgacaggtcctgccatttcaccaggaacatgtacacctgggggaaagccagagtcgggggaccccattcagcctccaaagaggctttg

SEQ ID NO: 28904 - RNA, 96 nt, synthetic construct
  source 1..96: mol_type = other RNA
accttctccgacaggtcctgccatttcaccaggaacatgtaaacctgggggaaagccagagtcgggggaccccattcagcctccaaagaggctttg

SEQ ID NO: 28905 - RNA, 97 nt, synthetic construct
  source 1..97: mol_type = other RNA
caccttctccgacaggtcctgccatttcaccaggaacatgtatacctgggggaaagccagagtcgggggaccccattcagcctccaaagaggctttg

SEQ ID NO: 28906 - RNA, 97 nt, synthetic construct
  source 1..97: mol_type = other RNA
caccttctccgacaggtcctgccatttcaccaggaacatgtaaacctgggggaaagccagagtcgggggaccccattcagcctccaaagaggctttg

SEQ ID NO: 28907 - RNA, 97 nt, synthetic construct
  source 1..97: mol_type = other RNA
caccttctccgacaggtcctgccatttcaccaggaacatgtagacctgggggaaagccagagtcgggggaccccattcagcctccaaagaggctttg

SEQ ID NO: 28908 - RNA, 97 nt, synthetic construct
  source 1..97: mol_type = other RNA
caccttctccgacaggtcctgccatttcaccaggaacatgtacacctgggggaaagccagagtcgggggaccccattcagcctccaaagaggctttg

SEQ ID NO: 28909 - RNA, 98 nt, synthetic construct
  source 1..98: mol_type = other RNA
ccaccttctccgacaggtcctgccatttcaccaggaacatgtaaacctgggggaaagccagagtcgggggaccccattcagcctccaaagaggctttg

SEQ ID NO: 28910 - RNA, 98 nt, synthetic construct
  source 1..98: mol_type = other RNA
ccaccttctccgacaggtcctgccatttcaccaggaacatgtatacctgggggaaagccagagtcgggggaccccattcagcctccaaagaggctttg

SEQ ID NO: 28911 - RNA, 98 nt, synthetic construct
  source 1..98: mol_type = other RNA
ccaccttctccgacaggtcctgccatttcaccaggaacatgtagacctgggggaaagccagagtcgggggaccccattcagcctccaaagaggctttg

SEQ ID NO: 28912 - RNA, 98 nt, synthetic construct
  source 1..98: mol_type = other RNA
ccaccttctccgacaggtcctgccatttcaccaggaacatgtacacctgggggaaagccagagtcgggggaccccattcagcctccaaagaggctttg

SEQ ID NO: 28913 - RNA, 99 nt, synthetic construct
  source 1..99: mol_type = other RNA
accaccttctccgacaggtcctgccatttcaccaggaacatgtagacctgggggaaagccagagtcgggggaccccattcagcctccaaagaggctttg

SEQ ID NO: 28914 - RNA, 99 nt, synthetic construct
  source 1..99: mol_type = other RNA
accaccttctccgacaggtcctgccatttcaccaggaacatgtatacctgggggaaagccagagtcgggggaccccattcagcctccaaagaggctttg

SEQ ID NO: 28915 - RNA, 99 nt, synthetic construct
  source 1..99: mol_type = other RNA
accaccttctccgacaggtcctgccatttcaccaggaacatgtacacctgggggaaagccagagtcgggggaccccattcagcctccaaagaggctttg

SEQ ID NO: 28916 - RNA, 99 nt, synthetic construct
  source 1..99: mol_type = other RNA
accaccttctccgacaggtcctgccatttcaccaggaacatgtaaacctgggggaaagccagagtcgggggaccccattcagcctccaaagaggctttg

SEQ ID NO: 28917 - RNA, 100 nt, synthetic construct
  source 1..100: mol_type = other RNA
gaccaccttctccgacaggtcctgccatttcaccaggaacatgtacacctgggggaaagccagagtcgggggaccccattcagcctccaaagaggctttg

SEQ ID NO: 28918 - RNA, 100 nt, synthetic construct
  source 1..100: mol_type = other RNA
gaccaccttctccgacaggtcctgccatttcaccaggaacatgtaaacctgggggaaagccagagtcgggggaccccattcagcctccaaagaggctttg

SEQ ID NO: 28919 - RNA, 100 nt, synthetic construct
  source 1..100: mol_type = other RNA
gaccaccttctccgacaggtcctgccatttcaccaggaacatgtagacctgggggaaagccagagtcgggggaccccattcagcctccaaagaggctttg

SEQ ID NO: 28920 - RNA, 100 nt, synthetic construct
  source 1..100: mol_type = other RNA
gaccaccttctccgacaggtcctgccatttcaccaggaacatgtatacctgggggaaagccagagtcgggggaccccattcagcctccaaagaggctttg

SEQ ID NO: 28921 - RNA, 101 nt, synthetic construct
  source 1..101: mol_type = other RNA
agaccaccttctccgacaggtcctgccatttcaccaggaacatgtaaacctgggggaaagccagagtcgggggaccccattcagcctccaaagaggctttg

SEQ ID NO: 28922 - RNA, 101 nt, synthetic construct
  source 1..101: mol_type = other RNA
agaccaccttctccgacaggtcctgccatttcaccaggaacatgtacacctgggggaaagccagagtcgggggaccccattcagcctccaaagaggctttg

SEQ ID NO: 28923 - RNA, 101 nt, synthetic construct
  source 1..101: mol_type = other RNA
agaccaccttctccgacaggtcctgccatttcaccaggaacatgtagacctgggggaaagccagagtcgggggaccccattcagcctccaaagaggctttg

SEQ ID NO: 28924 - RNA, 101 nt, synthetic construct
  source 1..101: mol_type = other RNA
agaccaccttctccgacaggtcctgccatttcaccaggaacatgtatacctgggggaaagccagagtcgggggaccccattcagcctccaaagaggctttg

SEQ ID NO: 28925 - RNA, 102 nt, synthetic construct
  source 1..102: mol_type = other RNA
tagaccaccttctccgacaggtcctgccatttcaccaggaacatgtaaacctgggggaaagccagagtcgggggaccccattcagcctccaaagaggctttg

SEQ ID NO: 28926 - RNA, 102 nt, synthetic construct
  source 1..102: mol_type = other RNA
tagaccaccttctccgacaggtcctgccatttcaccaggaacatgtacacctgggggaaagccagagtcgggggaccccattcagcctccaaagaggctttg

SEQ ID NO: 28927 - RNA, 102 nt, synthetic construct
  source 1..102: mol_type = other RNA
tagaccaccttctccgacaggtcctgccatttcaccaggaacatgtatacctgggggaaagccagagtcgggggaccccattcagcctccaaagaggctttg

SEQ ID NO: 28928 - RNA, 102 nt, synthetic construct
  source 1..102: mol_type = other RNA
tagaccaccttctccgacaggtcctgccatttcaccaggaacatgtagacctgggggaaagccagagtcgggggaccccattcagcctccaaagaggctttg

SEQ ID NO: 28929 - RNA, 103 nt, synthetic construct
  source 1..103: mol_type = other RNA
gtagaccaccttctccgacaggtcctgccatttcaccaggaacatgtaaacctgggggaaagccagagtcgggggaccccattcagcctccaaagaggctttg

SEQ ID NO: 28930 - RNA, 103 nt, synthetic construct
  source 1..103: mol_type = other RNA
gtagaccaccttctccgacaggtcctgccatttcaccaggaacatgtacacctgggggaaagccagagtcgggggaccccattcagcctccaaagaggctttg

SEQ ID NO: 28931 - RNA, 103 nt, synthetic construct
  source 1..103: mol_type = other RNA
gtagaccaccttctccgacaggtcctgccatttcaccaggaacatgtatacctgggggaaagccagagtcgggggaccccattcagcctccaaagaggctttg

SEQ ID NO: 28932 - RNA, 103 nt, synthetic construct
  source 1..103: mol_type = other RNA
gtagaccaccttctccgacaggtcctgccatttcaccaggaacatgtagacctgggggaaagccagagtcgggggaccccattcagcctccaaagaggctttg

SEQ ID NO: 28933 - RNA, 16 nt, synthetic construct
  source 1..16: mol_type = other RNA
tcgtagatctcggtga

SEQ ID NO: 28934 - RNA, 17 nt, synthetic construct
  source 1..17: mol_type = other RNA
ctcgtagatctcggtga

SEQ ID NO: 28935 - RNA, 18 nt, synthetic construct
  source 1..18: mol_type = other RNA
actcgtagatctcggtga

SEQ ID NO: 28936 - RNA, 19 nt, synthetic construct
  source 1..19: mol_type = other RNA
aactcgtagatctcggtga

SEQ ID NO: 28937 - RNA, 20 nt, synthetic construct
  source 1..20: mol_type = other RNA
gaactcgtagatctcggtga

SEQ ID NO: 28938 - RNA, 21 nt, synthetic construct
  source 1..21: mol_type = other RNA
ggaactcgtagatctcggtga

SEQ ID NO: 28939 - RNA, 22 nt, synthetic construct
  source 1..22: mol_type = other RNA
tggaactcgtagatctcggtga

SEQ ID NO: 28940-28946 - skipped (7 entries)

SEQ ID NO: 28947 - RNA, 10 nt, synthetic construct
  source 1..10: mol_type = other RNA
ccgagatcta

SEQ ID NO: 28948 - RNA, 11 nt, synthetic construct
  source 1..11: mol_type = other RNA
ccgagatctac

SEQ ID NO: 28949 - RNA, 12 nt, synthetic construct
  source 1..12: mol_type = other RNA
ccgagatctacg

SEQ ID NO: 28950 - RNA, 13 nt, synthetic construct
  source 1..13: mol_type = other RNA
ccgagatctacga

SEQ ID NO: 28951 - RNA, 14 nt, synthetic construct
  source 1..14: mol_type = other RNA
ccgagatctacgag

SEQ ID NO: 28952 - RNA, 15 nt, synthetic construct
  source 1..15: mol_type = other RNA
ccgagatctacgagt

SEQ ID NO: 28953 - RNA, 16 nt, synthetic construct
  source 1..16: mol_type = other RNA
ccgagatctacgagtt

SEQ ID NO: 28954 - RNA, 17 nt, synthetic construct
  source 1..17: mol_type = other RNA
ccgagatctacgagttc

SEQ ID NO: 28955 - RNA, 18 nt, synthetic construct
  source 1..18: mol_type = other RNA
ccgagatctacgagttcc

SEQ ID NO: 28956 - RNA, 19 nt, synthetic construct
  source 1..19: mol_type = other RNA
ccgagatctacgagttcca

SEQ ID NO: 28957 - RNA, 61 nt, synthetic construct
  source 1..61: mol_type = other RNA
gtttacatgttcctggtgaaatggcaggacctgtcggagaaggtggtctaccggcgtttca

SEQ ID NO: 28958 - RNA, 61 nt, synthetic construct
  source 1..61: mol_type = other RNA
gtttacatgttcctggtgaaatggcaggacctgtcggagaaggtggtctaccggcggttca

SEQ ID NO: 28959 - RNA, 61 nt, synthetic construct
  source 1..61: mol_type = other RNA
gtatacatgttcctggtgaaatggcaggacctgtcggagaaggtggtctaccggcgtttca

SEQ ID NO: 28960 - RNA, 61 nt, synthetic construct
  source 1..61: mol_type = other RNA
gtgtacatgttcctggtgaaatggcaggacctgtcggagaaggtggtctaccggcgtttca

SEQ ID NO: 28961 - RNA, 61 nt, synthetic construct
  source 1..61: mol_type = other RNA
gtgtacatgttcctggtgaaatggcaggacctgtcggagaaggtggtctaccggcggttca

SEQ ID NO: 28962 - RNA, 61 nt, synthetic construct
  source 1..61: mol_type = other RNA
gtatacatgttcctggtgaaatggcaggacctgtcggagaaggtggtctaccggaggttca

SEQ ID NO: 28963 - RNA, 61 nt, synthetic construct
  source 1..61: mol_type = other RNA
gtatacatgttcctggtgaaatggcaggacctgtcggagaaggtggtctaccggcgattca

SEQ ID NO: 28964 - RNA, 61 nt, synthetic construct
  source 1..61: mol_type = other RNA
gtatacatgttcctggtgaaatggcaggacctgtcggagaaggtggtctaccggcgcttca

SEQ ID NO: 28965 - RNA, 61 nt, synthetic construct
  source 1..61: mol_type = other RNA
gtatacatgttcctggtgaaatggcaggacctgtcggagaaggtggtctaccggcggttca

SEQ ID NO: 28966 - RNA, 61 nt, synthetic construct
  source 1..61: mol_type = other RNA
gtctacatgttcctggtgaaatggcaggacctgtcggagaaggtggtctaccggcgattca

SEQ ID NO: 28967 - RNA, 61 nt, synthetic construct
  source 1..61: mol_type = other RNA
gtctacatgttcctggtgaaatggcaggacctgtcggagaaggtggtctaccggagattca

SEQ ID NO: 28968 - RNA, 61 nt, synthetic construct
  source 1..61: mol_type = other RNA
gtctacatgttcctggtgaaatggcaggacctgtcggagaaggtggtctaccggaggttca

SEQ ID NO: 28969 - RNA, 61 nt, synthetic construct
  source 1..61: mol_type = other RNA
gtgtacatgttcctggtgaaatggcaggacctgtcggagaaggtggtctaccggaggttca

SEQ ID NO: 28970 - RNA, 61 nt, synthetic construct
  source 1..61: mol_type = other RNA
gtatacatgttcctggtgaaatggcaggacctgtcggagaaggtggtctaccggagattca

SEQ ID NO: 28971 - RNA, 61 nt, synthetic construct
  source 1..61: mol_type = other RNA
gtttacatgttcctggtgaaatggcaggacctgtcggagaaggtggtctaccggaggttca

SEQ ID NO: 28972 - RNA, 61 nt, synthetic construct
  source 1..61: mol_type = other RNA
gtctacatgttcctggtgaaatggcaggacctgtcggagaaggtggtctaccggcggttca

SEQ ID NO: 28973 - RNA, 61 nt, synthetic construct
  source 1..61: mol_type = other RNA
gtgtacatgttcctggtgaaatggcaggacctgtcggagaaggtggtctaccggcgattca

SEQ ID NO: 28974 - RNA, 61 nt, synthetic construct
  source 1..61: mol_type = other RNA
gtttacatgttcctggtgaaatggcaggacctgtcggagaaggtggtctaccggagattca

SEQ ID NO: 28975 - RNA, 61 nt, synthetic construct
  source 1..61: mol_type = other RNA
gtctacatgttcctggtgaaatggcaggacctgtcggagaaggtggtctaccggcgtttca

SEQ ID NO: 28976 - RNA, 61 nt, synthetic construct
  source 1..61: mol_type = other RNA
gtttacatgttcctggtgaaatggcaggacctgtcggagaaggtggtctaccggcgattca

SEQ ID NO: 28977 - RNA, 61 nt, synthetic construct
  source 1..61: mol_type = other RNA
gtgtacatgttcctggtgaaatggcaggacctgtcggagaaggtggtctaccggagattca

SEQ ID NO: 28978 - RNA, 61 nt, synthetic construct
  source 1..61: mol_type = other RNA
gtctacatgttcctggtgaaatggcaggacctgtcggagaaggtggtctaccggcgcttca

SEQ ID NO: 28979 - RNA, 61 nt, synthetic construct
  source 1..61: mol_type = other RNA
gtttacatgttcctggtgaaatggcaggacctgtcggagaaggtggtctaccggcgcttca

SEQ ID NO: 28980 - RNA, 61 nt, synthetic construct
  source 1..61: mol_type = other RNA
gtgtacatgttcctggtgaaatggcaggacctgtcggagaaggtggtctaccggcgcttca

SEQ ID NO: 28981 - RNA, 62 nt, synthetic construct
  source 1..62: mol_type = other RNA
ggtgtacatgttcctggtgaaatggcaggacctgtcggagaaggtggtctaccggagattca

SEQ ID NO: 28982 - RNA, 62 nt, synthetic construct
  source 1..62: mol_type = other RNA
ggtgtacatgttcctggtgaaatggcaggacctgtcggagaaggtggtctaccggcgattca

SEQ ID NO: 28983 - RNA, 62 nt, synthetic construct
  source 1..62: mol_type = other RNA
ggtctacatgttcctggtgaaatggcaggacctgtcggagaaggtggtctaccggcgcttca

SEQ ID NO: 28984 - RNA, 62 nt, synthetic construct
  source 1..62: mol_type = other RNA
ggtgtacatgttcctggtgaaatggcaggacctgtcggagaaggtggtctaccggaggttca

SEQ ID NO: 28985 - RNA, 62 nt, synthetic construct
  source 1..62: mol_type = other RNA
ggtctacatgttcctggtgaaatggcaggacctgtcggagaaggtggtctaccggaggttca

SEQ ID NO: 28986 - RNA, 62 nt, synthetic construct
  source 1..62: mol_type = other RNA
ggtttacatgttcctggtgaaatggcaggacctgtcggagaaggtggtctaccggcgattca

SEQ ID NO: 28987 - RNA, 62 nt, synthetic construct
  source 1..62: mol_type = other RNA
ggtgtacatgttcctggtgaaatggcaggacctgtcggagaaggtggtctaccggcggttca

SEQ ID NO: 28988 - RNA, 62 nt, synthetic construct
  source 1..62: mol_type = other RNA
ggtatacatgttcctggtgaaatggcaggacctgtcggagaaggtggtctaccggcgtttca

SEQ ID NO: 28989 - RNA, 62 nt, synthetic construct
  source 1..62: mol_type = other RNA
ggtatacatgttcctggtgaaatggcaggacctgtcggagaaggtggtctaccggcggttca

SEQ ID NO: 28990 - RNA, 62 nt, synthetic construct
  source 1..62: mol_type = other RNA
ggtatacatgttcctggtgaaatggcaggacctgtcggagaaggtggtctaccggcgcttca

SEQ ID NO: 28991 - RNA, 62 nt, synthetic construct
  source 1..62: mol_type = other RNA
ggtatacatgttcctggtgaaatggcaggacctgtcggagaaggtggtctaccggcgattca

SEQ ID NO: 28992 - RNA, 62 nt, synthetic construct
  source 1..62: mol_type = other RNA
ggtatacatgttcctggtgaaatggcaggacctgtcggagaaggtggtctaccggaggttca

SEQ ID NO: 28993 - RNA, 62 nt, synthetic construct
  source 1..62: mol_type = other RNA
ggtctacatgttcctggtgaaatggcaggacctgtcggagaaggtggtctaccggcgtttca

SEQ ID NO: 28994 - RNA, 62 nt, synthetic construct
  source 1..62: mol_type = other RNA
ggtatacatgttcctggtgaaatggcaggacctgtcggagaaggtggtctaccggagattca

SEQ ID NO: 28995 - RNA, 62 nt, synthetic construct
  source 1..62: mol_type = other RNA
ggtgtacatgttcctggtgaaatggcaggacctgtcggagaaggtggtctaccggcgtttca

SEQ ID NO: 28996 - RNA, 62 nt, synthetic construct
  source 1..62: mol_type = other RNA
ggtctacatgttcctggtgaaatggcaggacctgtcggagaaggtggtctaccggagattca

SEQ ID NO: 28997 - RNA, 62 nt, synthetic construct
  source 1..62: mol_type = other RNA
ggtttacatgttcctggtgaaatggcaggacctgtcggagaaggtggtctaccggcgtttca

SEQ ID NO: 28998 - RNA, 62 nt, synthetic construct
  source 1..62: mol_type = other RNA
ggtgtacatgttcctggtgaaatggcaggacctgtcggagaaggtggtctaccggcgcttca

SEQ ID NO: 28999 - RNA, 62 nt, synthetic construct
  source 1..62: mol_type = other RNA
ggtctacatgttcctggtgaaatggcaggacctgtcggagaaggtggtctaccggcggttca

SEQ ID NO: 29000 - RNA, 62 nt, synthetic construct
  source 1..62: mol_type = other RNA
ggtctacatgttcctggtgaaatggcaggacctgtcggagaaggtggtctaccggcgattca

SEQ ID NO: 29001 - RNA, 62 nt, synthetic construct
  source 1..62: mol_type = other RNA
ggtttacatgttcctggtgaaatggcaggacctgtcggagaaggtggtctaccggaggttca

SEQ ID NO: 29002 - RNA, 62 nt, synthetic construct
  source 1..62: mol_type = other RNA
ggtttacatgttcctggtgaaatggcaggacctgtcggagaaggtggtctaccggagattca

SEQ ID NO: 29003 - RNA, 62 nt, synthetic construct
  source 1..62: mol_type = other RNA
ggtttacatgttcctggtgaaatggcaggacctgtcggagaaggtggtctaccggcgcttca

SEQ ID NO: 29004 - RNA, 62 nt, synthetic construct
  source 1..62: mol_type = other RNA
ggtttacatgttcctggtgaaatggcaggacctgtcggagaaggtggtctaccggcggttca

SEQ ID NO: 29005 - RNA, 63 nt, synthetic construct
  source 1..63: mol_type = other RNA
aggtctacatgttcctggtgaaatggcaggacctgtcggagaaggtggtctaccggcgcttca

SEQ ID NO: 29006 - RNA, 63 nt, synthetic construct
  source 1..63: mol_type = other RNA
aggtatacatgttcctggtgaaatggcaggacctgtcggagaaggtggtctaccggcgattca

SEQ ID NO: 29007 - RNA, 63 nt, synthetic construct
  source 1..63: mol_type = other RNA
aggtgtacatgttcctggtgaaatggcaggacctgtcggagaaggtggtctaccggcggttca

SEQ ID NO: 29008 - RNA, 63 nt, synthetic construct
  source 1..63: mol_type = other RNA
aggtgtacatgttcctggtgaaatggcaggacctgtcggagaaggtggtctaccggcgcttca

SEQ ID NO: 29009 - RNA, 63 nt, synthetic construct
  source 1..63: mol_type = other RNA
aggtgtacatgttcctggtgaaatggcaggacctgtcggagaaggtggtctaccggcgattca

SEQ ID NO: 29010 - RNA, 63 nt, synthetic construct
  source 1..63: mol_type = other RNA
aggtgtacatgttcctggtgaaatggcaggacctgtcggagaaggtggtctaccggaggttca

SEQ ID NO: 29011 - RNA, 63 nt, synthetic construct
  source 1..63: mol_type = other RNA
aggtgtacatgttcctggtgaaatggcaggacctgtcggagaaggtggtctaccggagattca

SEQ ID NO: 29012 - RNA, 63 nt, synthetic construct
  source 1..63: mol_type = other RNA
aggtatacatgttcctggtgaaatggcaggacctgtcggagaaggtggtctaccggcggttca

SEQ ID NO: 29013 - RNA, 63 nt, synthetic construct
  source 1..63: mol_type = other RNA
aggtatacatgttcctggtgaaatggcaggacctgtcggagaaggtggtctaccggaggttca

SEQ ID NO: 29014 - RNA, 63 nt, synthetic construct
  source 1..63: mol_type = other RNA
aggtatacatgttcctggtgaaatggcaggacctgtcggagaaggtggtctaccggagattca

SEQ ID NO: 29015 - RNA, 63 nt, synthetic construct
  source 1..63: mol_type = other RNA
aggtctacatgttcctggtgaaatggcaggacctgtcggagaaggtggtctaccggcggttca

SEQ ID NO: 29016 - RNA, 63 nt, synthetic construct
  source 1..63: mol_type = other RNA
aggtttacatgttcctggtgaaatggcaggacctgtcggagaaggtggtctaccggcgattca

SEQ ID NO: 29017 - RNA, 63 nt, synthetic construct
  source 1..63: mol_type = other RNA
aggtttacatgttcctggtgaaatggcaggacctgtcggagaaggtggtctaccggcgcttca

SEQ ID NO: 29018 - RNA, 63 nt, synthetic construct
  source 1..63: mol_type = other RNA
aggtttacatgttcctggtgaaatggcaggacctgtcggagaaggtggtctaccggcgtttca

SEQ ID NO: 29019 - RNA, 63 nt, synthetic construct
  source 1..63: mol_type = other RNA
aggtttacatgttcctggtgaaatggcaggacctgtcggagaaggtggtctaccggcggttca

SEQ ID NO: 29020 - RNA, 63 nt, synthetic construct
  source 1..63: mol_type = other RNA
aggtttacatgttcctggtgaaatggcaggacctgtcggagaaggtggtctaccggaggttca

SEQ ID NO: 29021 - RNA, 63 nt, synthetic construct
  source 1..63: mol_type = other RNA
aggtctacatgttcctggtgaaatggcaggacctgtcggagaaggtggtctaccggaggttca

SEQ ID NO: 29022 - RNA, 63 nt, synthetic construct
  source 1..63: mol_type = other RNA
aggtctacatgttcctggtgaaatggcaggacctgtcggagaaggtggtctaccggcgattca

SEQ ID NO: 29023 - RNA, 63 nt, synthetic construct
  source 1..63: mol_type = other RNA
aggtctacatgttcctggtgaaatggcaggacctgtcggagaaggtggtctaccggcgtttca

SEQ ID NO: 29024 - RNA, 63 nt, synthetic construct
  source 1..63: mol_type = other RNA
aggtatacatgttcctggtgaaatggcaggacctgtcggagaaggtggtctaccggcgtttca

SEQ ID NO: 29025 - RNA, 63 nt, synthetic construct
  source 1..63: mol_type = other RNA
aggtctacatgttcctggtgaaatggcaggacctgtcggagaaggtggtctaccggagattca

SEQ ID NO: 29026 - RNA, 63 nt, synthetic construct
  source 1..63: mol_type = other RNA
aggtatacatgttcctggtgaaatggcaggacctgtcggagaaggtggtctaccggcgcttca

SEQ ID NO: 29027 - RNA, 63 nt, synthetic construct
  source 1..63: mol_type = other RNA
aggtttacatgttcctggtgaaatggcaggacctgtcggagaaggtggtctaccggagattca

SEQ ID NO: 29028 - RNA, 63 nt, synthetic construct
  source 1..63: mol_type = other RNA
aggtgtacatgttcctggtgaaatggcaggacctgtcggagaaggtggtctaccggcgtttca

SEQ ID NO: 29029 - RNA, 64 nt, synthetic construct
  source 1..64: mol_type = other RNA
caggtttacatgttcctggtgaaatggcaggacctgtcggagaaggtggtctaccggcgtttca

SEQ ID NO: 29030 - RNA, 64 nt, synthetic construct
  source 1..64: mol_type = other RNA
caggtatacatgttcctggtgaaatggcaggacctgtcggagaaggtggtctaccggagattca

SEQ ID NO: 29031 - RNA, 64 nt, synthetic construct
  source 1..64: mol_type = other RNA
caggtatacatgttcctggtgaaatggcaggacctgtcggagaaggtggtctaccggcgattca

SEQ ID NO: 29032 - RNA, 64 nt, synthetic construct
  source 1..64: mol_type = other RNA
caggtgtacatgttcctggtgaaatggcaggacctgtcggagaaggtggtctaccggcgcttca

SEQ ID NO: 29033 - RNA, 64 nt, synthetic construct
  source 1..64: mol_type = other RNA
caggtttacatgttcctggtgaaatggcaggacctgtcggagaaggtggtctaccggcgcttca

SEQ ID NO: 29034 - RNA, 64 nt, synthetic construct
  source 1..64: mol_type = other RNA
caggtttacatgttcctggtgaaatggcaggacctgtcggagaaggtggtctaccggcgattca

SEQ ID NO: 29035 - RNA, 64 nt, synthetic construct
  source 1..64: mol_type = other RNA
caggtgtacatgttcctggtgaaatggcaggacctgtcggagaaggtggtctaccggcgattca

SEQ ID NO: 29036 - RNA, 64 nt, synthetic construct
  source 1..64: mol_type = other RNA
caggtttacatgttcctggtgaaatggcaggacctgtcggagaaggtggtctaccggagattca

SEQ ID NO: 29037 - RNA, 64 nt, synthetic construct
  source 1..64: mol_type = other RNA
caggtctacatgttcctggtgaaatggcaggacctgtcggagaaggtggtctaccggaggttca

SEQ ID NO: 29038 - RNA, 64 nt, synthetic construct
  source 1..64: mol_type = other RNA
caggtatacatgttcctggtgaaatggcaggacctgtcggagaaggtggtctaccggcgtttca

SEQ ID NO: 29039 - RNA, 64 nt, synthetic construct
  source 1..64: mol_type = other RNA
caggtctacatgttcctggtgaaatggcaggacctgtcggagaaggtggtctaccggagattca

SEQ ID NO: 29040 - RNA, 64 nt, synthetic construct
  source 1..64: mol_type = other RNA
caggtctacatgttcctggtgaaatggcaggacctgtcggagaaggtggtctaccggcgattca

SEQ ID NO: 29041 - RNA, 64 nt, synthetic construct
  source 1..64: mol_type = other RNA
caggtgtacatgttcctggtgaaatggcaggacctgtcggagaaggtggtctaccggaggttca

SEQ ID NO: 29042 - RNA, 64 nt, synthetic construct
  source 1..64: mol_type = other RNA
caggtctacatgttcctggtgaaatggcaggacctgtcggagaaggtggtctaccggcggttca

SEQ ID NO: 29043 - RNA, 64 nt, synthetic construct
  source 1..64: mol_type = other RNA
caggtctacatgttcctggtgaaatggcaggacctgtcggagaaggtggtctaccggcgtttca

SEQ ID NO: 29044 - RNA, 64 nt, synthetic construct
  source 1..64: mol_type = other RNA
caggtttacatgttcctggtgaaatggcaggacctgtcggagaaggtggtctaccggcggttca

SEQ ID NO: 29045 - RNA, 64 nt, synthetic construct
  source 1..64: mol_type = other RNA
caggtatacatgttcctggtgaaatggcaggacctgtcggagaaggtggtctaccggcggttca

SEQ ID NO: 29046 - RNA, 64 nt, synthetic construct
  source 1..64: mol_type = other RNA
caggtctacatgttcctggtgaaatggcaggacctgtcggagaaggtggtctaccggcgcttca

SEQ ID NO: 29047 - RNA, 64 nt, synthetic construct
  source 1..64: mol_type = other RNA
caggtatacatgttcctggtgaaatggcaggacctgtcggagaaggtggtctaccggcgcttca

SEQ ID NO: 29048 - RNA, 64 nt, synthetic construct
  source 1..64: mol_type = other RNA
caggtttacatgttcctggtgaaatggcaggacctgtcggagaaggtggtctaccggaggttca

SEQ ID NO: 29049 - RNA, 64 nt, synthetic construct
  source 1..64: mol_type = other RNA
caggtatacatgttcctggtgaaatggcaggacctgtcggagaaggtggtctaccggaggttca

SEQ ID NO: 29050 - RNA, 64 nt, synthetic construct
  source 1..64: mol_type = other RNA
caggtgtacatgttcctggtgaaatggcaggacctgtcggagaaggtggtctaccggagattca

SEQ ID NO: 29051 - RNA, 64 nt, synthetic construct
  source 1..64: mol_type = other RNA
caggtgtacatgttcctggtgaaatggcaggacctgtcggagaaggtggtctaccggcggttca

SEQ ID NO: 29052 - RNA, 64 nt, synthetic construct
  source 1..64: mol_type = other RNA
caggtgtacatgttcctggtgaaatggcaggacctgtcggagaaggtggtctaccggcgtttca

SEQ ID NO: 29053 - RNA, 65 nt, synthetic construct
  source 1..65: mol_type = other RNA
ccaggtatacatgttcctggtgaaatggcaggacctgtcggagaaggtggtctaccggcgattca

SEQ ID NO: 29054 - RNA, 65 nt, synthetic construct
  source 1..65: mol_type = other RNA
ccaggtgtacatgttcctggtgaaatggcaggacctgtcggagaaggtggtctaccggcgcttca

SEQ ID NO: 29055 - RNA, 65 nt, synthetic construct
  source 1..65: mol_type = other RNA
ccaggtgtacatgttcctggtgaaatggcaggacctgtcggagaaggtggtctaccggagattca

SEQ ID NO: 29056 - RNA, 65 nt, synthetic construct
  source 1..65: mol_type = other RNA
ccaggtatacatgttcctggtgaaatggcaggacctgtcggagaaggtggtctaccggaggttca

SEQ ID NO: 29057 - RNA, 65 nt, synthetic construct
  source 1..65: mol_type = other RNA
ccaggtgtacatgttcctggtgaaatggcaggacctgtcggagaaggtggtctaccggcggttca

SEQ ID NO: 29058 - RNA, 65 nt, synthetic construct
  source 1..65: mol_type = other RNA
ccaggtatacatgttcctggtgaaatggcaggacctgtcggagaaggtggtctaccggcgcttca

SEQ ID NO: 29059 - RNA, 65 nt, synthetic construct
  source 1..65: mol_type = other RNA
ccaggtatacatgttcctggtgaaatggcaggacctgtcggagaaggtggtctaccggcggttca

SEQ ID NO: 29060 - RNA, 65 nt, synthetic construct
  source 1..65: mol_type = other RNA
ccaggtatacatgttcctggtgaaatggcaggacctgtcggagaaggtggtctaccggcgtttca

SEQ ID NO: 29061 - RNA, 65 nt, synthetic construct
  source 1..65: mol_type = other RNA
ccaggtctacatgttcctggtgaaatggcaggacctgtcggagaaggtggtctaccggagattca

SEQ ID NO: 29062 - RNA, 65 nt, synthetic construct
  source 1..65: mol_type = other RNA
ccaggtctacatgttcctggtgaaatggcaggacctgtcggagaaggtggtctaccggcgattca

SEQ ID NO: 29063 - RNA, 65 nt, synthetic construct
  source 1..65: mol_type = other RNA
ccaggtctacatgttcctggtgaaatggcaggacctgtcggagaaggtggtctaccggcgcttca

SEQ ID NO: 29064 - RNA, 65 nt, synthetic construct
  source 1..65: mol_type = other RNA
ccaggtctacatgttcctggtgaaatggcaggacctgtcggagaaggtggtctaccggcgtttca

SEQ ID NO: 29065 - RNA, 65 nt, synthetic construct
  source 1..65: mol_type = other RNA
ccaggtctacatgttcctggtgaaatggcaggacctgtcggagaaggtggtctaccggaggttca

SEQ ID NO: 29066 - RNA, 65 nt, synthetic construct
  source 1..65: mol_type = other RNA
ccaggtgtacatgttcctggtgaaatggcaggacctgtcggagaaggtggtctaccggaggttca

SEQ ID NO: 29067 - RNA, 65 nt, synthetic construct
  source 1..65: mol_type = other RNA
ccaggtttacatgttcctggtgaaatggcaggacctgtcggagaaggtggtctaccggaggttca

SEQ ID NO: 29068 - RNA, 65 nt, synthetic construct
  source 1..65: mol_type = other RNA
ccaggtgtacatgttcctggtgaaatggcaggacctgtcggagaaggtggtctaccggcgattca

SEQ ID NO: 29069 - RNA, 65 nt, synthetic construct
  source 1..65: mol_type = other RNA
ccaggtttacatgttcctggtgaaatggcaggacctgtcggagaaggtggtctaccggcggttca

SEQ ID NO: 29070 - RNA, 65 nt, synthetic construct
  source 1..65: mol_type = other RNA
ccaggtttacatgttcctggtgaaatggcaggacctgtcggagaaggtggtctaccggcgcttca

SEQ ID NO: 29071 - RNA, 65 nt, synthetic construct
  source 1..65: mol_type = other RNA
ccaggtttacatgttcctggtgaaatggcaggacctgtcggagaaggtggtctaccggcgattca

SEQ ID NO: 29072 - RNA, 65 nt, synthetic construct
  source 1..65: mol_type = other RNA
ccaggtttacatgttcctggtgaaatggcaggacctgtcggagaaggtggtctaccggcgtttca

SEQ ID NO: 29073 - RNA, 65 nt, synthetic construct
  source 1..65: mol_type = other RNA
ccaggtatacatgttcctggtgaaatggcaggacctgtcggagaaggtggtctaccggagattca

SEQ ID NO: 29074 - RNA, 65 nt, synthetic construct
  source 1..65: mol_type = other RNA
ccaggtttacatgttcctggtgaaatggcaggacctgtcggagaaggtggtctaccggagattca

SEQ ID NO: 29075 - RNA, 65 nt, synthetic construct
  source 1..65: mol_type = other RNA
ccaggtgtacatgttcctggtgaaatggcaggacctgtcggagaaggtggtctaccggcgtttca

SEQ ID NO: 29076 - RNA, 65 nt, synthetic construct
  source 1..65: mol_type = other RNA
ccaggtctacatgttcctggtgaaatggcaggacctgtcggagaaggtggtctaccggcggttca

SEQ ID NO: 29077 - RNA, 66 nt, synthetic construct
  source 1..66: mol_type = other RNA
cccaggtttacatgttcctggtgaaatggcaggacctgtcggagaaggtggtctaccggcgcttca

SEQ ID NO: 29078 - RNA, 66 nt, synthetic construct
  source 1..66: mol_type = other RNA
cccaggtttacatgttcctggtgaaatggcaggacctgtcggagaaggtggtctaccggcgattca

SEQ ID NO: 29079 - RNA, 66 nt, synthetic construct
  source 1..66: mol_type = other RNA
cccaggtttacatgttcctggtgaaatggcaggacctgtcggagaaggtggtctaccggaggttca

SEQ ID NO: 29080 - RNA, 66 nt, synthetic construct
  source 1..66: mol_type = other RNA
cccaggtttacatgttcctggtgaaatggcaggacctgtcggagaaggtggtctaccggagattca

SEQ ID NO: 29081 - RNA, 66 nt, synthetic construct
  source 1..66: mol_type = other RNA
cccaggtgtacatgttcctggtgaaatggcaggacctgtcggagaaggtggtctaccggcgtttca

SEQ ID NO: 29082 - RNA, 66 nt, synthetic construct
  source 1..66: mol_type = other RNA
cccaggtgtacatgttcctggtgaaatggcaggacctgtcggagaaggtggtctaccggcggttca

SEQ ID NO: 29083 - RNA, 66 nt, synthetic construct
  source 1..66: mol_type = other RNA
cccaggtgtacatgttcctggtgaaatggcaggacctgtcggagaaggtggtctaccggcgcttca

SEQ ID NO: 29084 - RNA, 66 nt, synthetic construct
  source 1..66: mol_type = other RNA
cccaggtgtacatgttcctggtgaaatggcaggacctgtcggagaaggtggtctaccggcgattca

SEQ ID NO: 29085 - RNA, 66 nt, synthetic construct
  source 1..66: mol_type = other RNA
cccaggtgtacatgttcctggtgaaatggcaggacctgtcggagaaggtggtctaccggaggttca

SEQ ID NO: 29086 - RNA, 66 nt, synthetic construct
  source 1..66: mol_type = other RNA
cccaggtttacatgttcctggtgaaatggcaggacctgtcggagaaggtggtctaccggcgtttca

SEQ ID NO: 29087 - RNA, 66 nt, synthetic construct
  source 1..66: mol_type = other RNA
cccaggtctacatgttcctggtgaaatggcaggacctgtcggagaaggtggtctaccggcgcttca

SEQ ID NO: 29088 - RNA, 66 nt, synthetic construct
  source 1..66: mol_type = other RNA
cccaggtctacatgttcctggtgaaatggcaggacctgtcggagaaggtggtctaccggcgattca

SEQ ID NO: 29089 - RNA, 66 nt, synthetic construct
  source 1..66: mol_type = other RNA
cccaggtctacatgttcctggtgaaatggcaggacctgtcggagaaggtggtctaccggcggttca

SEQ ID NO: 29090 - RNA, 66 nt, synthetic construct
  source 1..66: mol_type = other RNA
cccaggtctacatgttcctggtgaaatggcaggacctgtcggagaaggtggtctaccggagattca

SEQ ID NO: 29091 - RNA, 66 nt, synthetic construct
  source 1..66: mol_type = other RNA
cccaggtatacatgttcctggtgaaatggcaggacctgtcggagaaggtggtctaccggcgtttca

SEQ ID NO: 29092 - RNA, 66 nt, synthetic construct
  source 1..66: mol_type = other RNA
cccaggtatacatgttcctggtgaaatggcaggacctgtcggagaaggtggtctaccggcggttca

SEQ ID NO: 29093 - RNA, 66 nt, synthetic construct
  source 1..66: mol_type = other RNA
cccaggtatacatgttcctggtgaaatggcaggacctgtcggagaaggtggtctaccggcgcttca

SEQ ID NO: 29094 - RNA, 66 nt, synthetic construct
  source 1..66: mol_type = other RNA
cccaggtatacatgttcctggtgaaatggcaggacctgtcggagaaggtggtctaccggcgattca

SEQ ID NO: 29095 - RNA, 66 nt, synthetic construct
  source 1..66: mol_type = other RNA
cccaggtttacatgttcctggtgaaatggcaggacctgtcggagaaggtggtctaccggcggttca

SEQ ID NO: 29096 - RNA, 66 nt, synthetic construct
  source 1..66: mol_type = other RNA
cccaggtatacatgttcctggtgaaatggcaggacctgtcggagaaggtggtctaccggaggttca

SEQ ID NO: 29097 - RNA, 66 nt, synthetic construct
  source 1..66: mol_type = other RNA
cccaggtctacatgttcctggtgaaatggcaggacctgtcggagaaggtggtctaccggcgtttca

SEQ ID NO: 29098 - RNA, 66 nt, synthetic construct
  source 1..66: mol_type = other RNA
cccaggtctacatgttcctggtgaaatggcaggacctgtcggagaaggtggtctaccggaggttca

SEQ ID NO: 29099 - RNA, 66 nt, synthetic construct
  source 1..66: mol_type = other RNA
cccaggtatacatgttcctggtgaaatggcaggacctgtcggagaaggtggtctaccggagattca

SEQ ID NO: 29100 - RNA, 66 nt, synthetic construct
  source 1..66: mol_type = other RNA
cccaggtgtacatgttcctggtgaaatggcaggacctgtcggagaaggtggtctaccggagattca

SEQ ID NO: 29101 - RNA, 67 nt, synthetic construct
  source 1..67: mol_type = other RNA
ccccaggtctacatgttcctggtgaaatggcaggacctgtcggagaaggtggtctaccggaggttca

SEQ ID NO: 29102 - RNA, 67 nt, synthetic construct
  source 1..67: mol_type = other RNA
ccccaggtctacatgttcctggtgaaatggcaggacctgtcggagaaggtggtctaccggcgattca

SEQ ID NO: 29103 - RNA, 67 nt, synthetic construct
  source 1..67: mol_type = other RNA
ccccaggtgtacatgttcctggtgaaatggcaggacctgtcggagaaggtggtctaccggaggttca

SEQ ID NO: 29104 - RNA, 67 nt, synthetic construct
  source 1..67: mol_type = other RNA
ccccaggtatacatgttcctggtgaaatggcaggacctgtcggagaaggtggtctaccggcggttca

SEQ ID NO: 29105 - RNA, 67 nt, synthetic construct
  source 1..67: mol_type = other RNA
ccccaggtgtacatgttcctggtgaaatggcaggacctgtcggagaaggtggtctaccggcgcttca

SEQ ID NO: 29106 - RNA, 67 nt, synthetic construct
  source 1..67: mol_type = other RNA
ccccaggtgtacatgttcctggtgaaatggcaggacctgtcggagaaggtggtctaccggcgattca

SEQ ID NO: 29107 - RNA, 67 nt, synthetic construct
  source 1..67: mol_type = other RNA
ccccaggtctacatgttcctggtgaaatggcaggacctgtcggagaaggtggtctaccggcgtttca

SEQ ID NO: 29108 - RNA, 67 nt, synthetic construct
  source 1..67: mol_type = other RNA
ccccaggtttacatgttcctggtgaaatggcaggacctgtcggagaaggtggtctaccggagattca

SEQ ID NO: 29109 - RNA, 67 nt, synthetic construct
  source 1..67: mol_type = other RNA
ccccaggtgtacatgttcctggtgaaatggcaggacctgtcggagaaggtggtctaccggagattca

SEQ ID NO: 29110 - RNA, 67 nt, synthetic construct
  source 1..67: mol_type = other RNA
ccccaggtttacatgttcctggtgaaatggcaggacctgtcggagaaggtggtctaccggcggttca

SEQ ID NO: 29111 - RNA, 67 nt, synthetic construct
  source 1..67: mol_type = other RNA
ccccaggtttacatgttcctggtgaaatggcaggacctgtcggagaaggtggtctaccggcgattca

SEQ ID NO: 29112 - RNA, 67 nt, synthetic construct
  source 1..67: mol_type = other RNA
ccccaggtctacatgttcctggtgaaatggcaggacctgtcggagaaggtggtctaccggcgcttca

SEQ ID NO: 29113 - RNA, 67 nt, synthetic construct
  source 1..67: mol_type = other RNA
ccccaggtctacatgttcctggtgaaatggcaggacctgtcggagaaggtggtctaccggagattca

SEQ ID NO: 29114 - RNA, 67 nt, synthetic construct
  source 1..67: mol_type = other RNA
ccccaggtttacatgttcctggtgaaatggcaggacctgtcggagaaggtggtctaccggcgtttca

SEQ ID NO: 29115 - RNA, 67 nt, synthetic construct
  source 1..67: mol_type = other RNA
ccccaggtgtacatgttcctggtgaaatggcaggacctgtcggagaaggtggtctaccggcggttca

SEQ ID NO: 29116 - RNA, 67 nt, synthetic construct
  source 1..67: mol_type = other RNA
ccccaggtttacatgttcctggtgaaatggcaggacctgtcggagaaggtggtctaccggcgcttca

SEQ ID NO: 29117 - RNA, 67 nt, synthetic construct
  source 1..67: mol_type = other RNA
ccccaggtgtacatgttcctggtgaaatggcaggacctgtcggagaaggtggtctaccggcgtttca

SEQ ID NO: 29118 - RNA, 67 nt, synthetic construct
  source 1..67: mol_type = other RNA
ccccaggtatacatgttcctggtgaaatggcaggacctgtcggagaaggtggtctaccggcgtttca

SEQ ID NO: 29119 - RNA, 67 nt, synthetic construct
  source 1..67: mol_type = other RNA
ccccaggtatacatgttcctggtgaaatggcaggacctgtcggagaaggtggtctaccggcgattca

SEQ ID NO: 29120 - RNA, 67 nt, synthetic construct
  source 1..67: mol_type = other RNA
ccccaggtatacatgttcctggtgaaatggcaggacctgtcggagaaggtggtctaccggcgcttca

SEQ ID NO: 29121 - RNA, 67 nt, synthetic construct
  source 1..67: mol_type = other RNA
ccccaggtttacatgttcctggtgaaatggcaggacctgtcggagaaggtggtctaccggaggttca

SEQ ID NO: 29122 - RNA, 67 nt, synthetic construct
  source 1..67: mol_type = other RNA
ccccaggtctacatgttcctggtgaaatggcaggacctgtcggagaaggtggtctaccggcggttca

SEQ ID NO: 29123 - RNA, 67 nt, synthetic construct
  source 1..67: mol_type = other RNA
ccccaggtatacatgttcctggtgaaatggcaggacctgtcggagaaggtggtctaccggagattca

SEQ ID NO: 29124 - RNA, 67 nt, synthetic construct
  source 1..67: mol_type = other RNA
ccccaggtatacatgttcctggtgaaatggcaggacctgtcggagaaggtggtctaccggaggttca

SEQ ID NO: 29125 - RNA, 68 nt, synthetic construct
  source 1..68: mol_type = other RNA
cccccaggtctacatgttcctggtgaaatggcaggacctgtcggagaaggtggtctaccggcggttca

SEQ ID NO: 29126 - RNA, 68 nt, synthetic construct
  source 1..68: mol_type = other RNA
cccccaggtttacatgttcctggtgaaatggcaggacctgtcggagaaggtggtctaccggcgtttca

SEQ ID NO: 29127 - RNA, 68 nt, synthetic construct
  source 1..68: mol_type = other RNA
cccccaggtgtacatgttcctggtgaaatggcaggacctgtcggagaaggtggtctaccggaggttca

SEQ ID NO: 29128 - RNA, 68 nt, synthetic construct
  source 1..68: mol_type = other RNA
cccccaggtttacatgttcctggtgaaatggcaggacctgtcggagaaggtggtctaccggcgcttca

SEQ ID NO: 29129 - RNA, 68 nt, synthetic construct
  source 1..68: mol_type = other RNA
cccccaggtctacatgttcctggtgaaatggcaggacctgtcggagaaggtggtctaccggaggttca

SEQ ID NO: 29130 - RNA, 68 nt, synthetic construct
  source 1..68: mol_type = other RNA
cccccaggtttacatgttcctggtgaaatggcaggacctgtcggagaaggtggtctaccggcggttca

SEQ ID NO: 29131 - RNA, 68 nt, synthetic construct
  source 1..68: mol_type = other RNA
cccccaggtttacatgttcctggtgaaatggcaggacctgtcggagaaggtggtctaccggaggttca

SEQ ID NO: 29132 - RNA, 68 nt, synthetic construct
  source 1..68: mol_type = other RNA
cccccaggtgtacatgttcctggtgaaatggcaggacctgtcggagaaggtggtctaccggcgtttca

SEQ ID NO: 29133 - RNA, 68 nt, synthetic construct
  source 1..68: mol_type = other RNA
cccccaggtgtacatgttcctggtgaaatggcaggacctgtcggagaaggtggtctaccggcggttca

SEQ ID NO: 29134 - RNA, 68 nt, synthetic construct
  source 1..68: mol_type = other RNA
cccccaggtgtacatgttcctggtgaaatggcaggacctgtcggagaaggtggtctaccggcgcttca

SEQ ID NO: 29135 - RNA, 68 nt, synthetic construct
  source 1..68: mol_type = other RNA
cccccaggtttacatgttcctggtgaaatggcaggacctgtcggagaaggtggtctaccggcgattca

SEQ ID NO: 29136 - RNA, 68 nt, synthetic construct
  source 1..68: mol_type = other RNA
cccccaggtgtacatgttcctggtgaaatggcaggacctgtcggagaaggtggtctaccggcgattca

SEQ ID NO: 29137 - RNA, 68 nt, synthetic construct
  source 1..68: mol_type = other RNA
cccccaggtctacatgttcctggtgaaatggcaggacctgtcggagaaggtggtctaccggcgcttca

SEQ ID NO: 29138 - RNA, 68 nt, synthetic construct
  source 1..68: mol_type = other RNA
cccccaggtgtacatgttcctggtgaaatggcaggacctgtcggagaaggtggtctaccggagattca

SEQ ID NO: 29139 - RNA, 68 nt, synthetic construct
  source 1..68: mol_type = other RNA
cccccaggtctacatgttcctggtgaaatggcaggacctgtcggagaaggtggtctaccggcgtttca

SEQ ID NO: 29140 - RNA, 68 nt, synthetic construct
  source 1..68: mol_type = other RNA
cccccaggtatacatgttcctggtgaaatggcaggacctgtcggagaaggtggtctaccggagattca

SEQ ID NO: 29141 - RNA, 68 nt, synthetic construct
  source 1..68: mol_type = other RNA
cccccaggtatacatgttcctggtgaaatggcaggacctgtcggagaaggtggtctaccggaggttca

SEQ ID NO: 29142 - RNA, 68 nt, synthetic construct
  source 1..68: mol_type = other RNA
cccccaggtatacatgttcctggtgaaatggcaggacctgtcggagaaggtggtctaccggcgattca

SEQ ID NO: 29143 - RNA, 68 nt, synthetic construct
  source 1..68: mol_type = other RNA
cccccaggtttacatgttcctggtgaaatggcaggacctgtcggagaaggtggtctaccggagattca

SEQ ID NO: 29144 - RNA, 68 nt, synthetic construct
  source 1..68: mol_type = other RNA
cccccaggtatacatgttcctggtgaaatggcaggacctgtcggagaaggtggtctaccggcggttca

SEQ ID NO: 29145 - RNA, 68 nt, synthetic construct
  source 1..68: mol_type = other RNA
cccccaggtatacatgttcctggtgaaatggcaggacctgtcggagaaggtggtctaccggcgtttca

SEQ ID NO: 29146 - RNA, 68 nt, synthetic construct
  source 1..68: mol_type = other RNA
cccccaggtctacatgttcctggtgaaatggcaggacctgtcggagaaggtggtctaccggagattca

SEQ ID NO: 29147 - RNA, 68 nt, synthetic construct
  source 1..68: mol_type = other RNA
cccccaggtctacatgttcctggtgaaatggcaggacctgtcggagaaggtggtctaccggcgattca

SEQ ID NO: 29148 - RNA, 68 nt, synthetic construct
  source 1..68: mol_type = other RNA
cccccaggtatacatgttcctggtgaaatggcaggacctgtcggagaaggtggtctaccggcgcttca

SEQ ID NO: 29149 - RNA, 69 nt, synthetic construct
  source 1..69: mol_type = other RNA
tcccccaggtctacatgttcctggtgaaatggcaggacctgtcggagaaggtggtctaccggaggttca

SEQ ID NO: 29150 - RNA, 69 nt, synthetic construct
  source 1..69: mol_type = other RNA
tcccccaggtctacatgttcctggtgaaatggcaggacctgtcggagaaggtggtctaccggcgattca

SEQ ID NO: 29151 - RNA, 69 nt, synthetic construct
  source 1..69: mol_type = other RNA
tcccccaggtatacatgttcctggtgaaatggcaggacctgtcggagaaggtggtctaccggcggttca

SEQ ID NO: 29152 - RNA, 69 nt, synthetic construct
  source 1..69: mol_type = other RNA
tcccccaggtctacatgttcctggtgaaatggcaggacctgtcggagaaggtggtctaccggagattca

SEQ ID NO: 29153 - RNA, 69 nt, synthetic construct
  source 1..69: mol_type = other RNA
tcccccaggtgtacatgttcctggtgaaatggcaggacctgtcggagaaggtggtctaccggagattca

SEQ ID NO: 29154 - RNA, 69 nt, synthetic construct
  source 1..69: mol_type = other RNA
tcccccaggtttacatgttcctggtgaaatggcaggacctgtcggagaaggtggtctaccggagattca

SEQ ID NO: 29155 - RNA, 69 nt, synthetic construct
  source 1..69: mol_type = other RNA
tcccccaggtatacatgttcctggtgaaatggcaggacctgtcggagaaggtggtctaccggaggttca

SEQ ID NO: 29156 - RNA, 69 nt, synthetic construct
  source 1..69: mol_type = other RNA
tcccccaggtatacatgttcctggtgaaatggcaggacctgtcggagaaggtggtctaccggagattca

SEQ ID NO: 29157 - RNA, 69 nt, synthetic construct
  source 1..69: mol_type = other RNA
tcccccaggtctacatgttcctggtgaaatggcaggacctgtcggagaaggtggtctaccggcgcttca

SEQ ID NO: 29158 - RNA, 69 nt, synthetic construct
  source 1..69: mol_type = other RNA
tcccccaggtctacatgttcctggtgaaatggcaggacctgtcggagaaggtggtctaccggcgtttca

SEQ ID NO: 29159 - RNA, 69 nt, synthetic construct
  source 1..69: mol_type = other RNA
tcccccaggtctacatgttcctggtgaaatggcaggacctgtcggagaaggtggtctaccggcggttca

SEQ ID NO: 29160 - RNA, 69 nt, synthetic construct
  source 1..69: mol_type = other RNA
tcccccaggtgtacatgttcctggtgaaatggcaggacctgtcggagaaggtggtctaccggcgtttca

SEQ ID NO: 29161 - RNA, 69 nt, synthetic construct
  source 1..69: mol_type = other RNA
tcccccaggtttacatgttcctggtgaaatggcaggacctgtcggagaaggtggtctaccggcgtttca

SEQ ID NO: 29162 - RNA, 69 nt, synthetic construct
  source 1..69: mol_type = other RNA
tcccccaggtgtacatgttcctggtgaaatggcaggacctgtcggagaaggtggtctaccggaggttca

SEQ ID NO: 29163 - RNA, 69 nt, synthetic construct
  source 1..69: mol_type = other RNA
tcccccaggtgtacatgttcctggtgaaatggcaggacctgtcggagaaggtggtctaccggcgcttca

SEQ ID NO: 29164 - RNA, 69 nt, synthetic construct
  source 1..69: mol_type = other RNA
tcccccaggtgtacatgttcctggtgaaatggcaggacctgtcggagaaggtggtctaccggcggttca

SEQ ID NO: 29165 - RNA, 69 nt, synthetic construct
  source 1..69: mol_type = other RNA
tcccccaggtatacatgttcctggtgaaatggcaggacctgtcggagaaggtggtctaccggcgtttca

SEQ ID NO: 29166 - RNA, 69 nt, synthetic construct
  source 1..69: mol_type = other RNA
tcccccaggtatacatgttcctggtgaaatggcaggacctgtcggagaaggtggtctaccggcgattca

SEQ ID NO: 29167 - RNA, 69 nt, synthetic construct
  source 1..69: mol_type = other RNA
tcccccaggtttacatgttcctggtgaaatggcaggacctgtcggagaaggtggtctaccggcgattca

SEQ ID NO: 29168 - RNA, 69 nt, synthetic construct
  source 1..69: mol_type = other RNA
tcccccaggtttacatgttcctggtgaaatggcaggacctgtcggagaaggtggtctaccggcgcttca

SEQ ID NO: 29169 - RNA, 69 nt, synthetic construct
  source 1..69: mol_type = other RNA
tcccccaggtttacatgttcctggtgaaatggcaggacctgtcggagaaggtggtctaccggaggttca

SEQ ID NO: 29170 - RNA, 69 nt, synthetic construct
  source 1..69: mol_type = other RNA
tcccccaggtttacatgttcctggtgaaatggcaggacctgtcggagaaggtggtctaccggcggttca

SEQ ID NO: 29171 - RNA, 69 nt, synthetic construct
  source 1..69: mol_type = other RNA
tcccccaggtgtacatgttcctggtgaaatggcaggacctgtcggagaaggtggtctaccggcgattca

SEQ ID NO: 29172 - RNA, 69 nt, synthetic construct
  source 1..69: mol_type = other RNA
tcccccaggtatacatgttcctggtgaaatggcaggacctgtcggagaaggtggtctaccggcgcttca

SEQ ID NO: 29173 - RNA, 70 nt, synthetic construct
  source 1..70: mol_type = other RNA
ttcccccaggtttacatgttcctggtgaaatggcaggacctgtcggagaaggtggtctaccggcgtttca

SEQ ID NO: 29174 - RNA, 70 nt, synthetic construct
  source 1..70: mol_type = other RNA
ttcccccaggtatacatgttcctggtgaaatggcaggacctgtcggagaaggtggtctaccggagattca

SEQ ID NO: 29175 - RNA, 70 nt, synthetic construct
  source 1..70: mol_type = other RNA
ttcccccaggtatacatgttcctggtgaaatggcaggacctgtcggagaaggtggtctaccggaggttca

SEQ ID NO: 29176 - RNA, 70 nt, synthetic construct
  source 1..70: mol_type = other RNA
ttcccccaggtatacatgttcctggtgaaatggcaggacctgtcggagaaggtggtctaccggcgattca

SEQ ID NO: 29177 - RNA, 70 nt, synthetic construct
  source 1..70: mol_type = other RNA
ttcccccaggtatacatgttcctggtgaaatggcaggacctgtcggagaaggtggtctaccggcgcttca

SEQ ID NO: 29178 - RNA, 70 nt, synthetic construct
  source 1..70: mol_type = other RNA
ttcccccaggtatacatgttcctggtgaaatggcaggacctgtcggagaaggtggtctaccggcggttca

SEQ ID NO: 29179 - RNA, 70 nt, synthetic construct
  source 1..70: mol_type = other RNA
ttcccccaggtctacatgttcctggtgaaatggcaggacctgtcggagaaggtggtctaccggcgtttca

SEQ ID NO: 29180 - RNA, 70 nt, synthetic construct
  source 1..70: mol_type = other RNA
ttcccccaggtctacatgttcctggtgaaatggcaggacctgtcggagaaggtggtctaccggagattca

SEQ ID NO: 29181 - RNA, 70 nt, synthetic construct
  source 1..70: mol_type = other RNA
ttcccccaggtctacatgttcctggtgaaatggcaggacctgtcggagaaggtggtctaccggaggttca

SEQ ID NO: 29182 - RNA, 70 nt, synthetic construct
  source 1..70: mol_type = other RNA
ttcccccaggtctacatgttcctggtgaaatggcaggacctgtcggagaaggtggtctaccggcgattca

SEQ ID NO: 29183 - RNA, 70 nt, synthetic construct
  source 1..70: mol_type = other RNA
ttcccccaggtgtacatgttcctggtgaaatggcaggacctgtcggagaaggtggtctaccggcgcttca

SEQ ID NO: 29184 - RNA, 70 nt, synthetic construct
  source 1..70: mol_type = other RNA
ttcccccaggtttacatgttcctggtgaaatggcaggacctgtcggagaaggtggtctaccggcgcttca

SEQ ID NO: 29185 - RNA, 70 nt, synthetic construct
  source 1..70: mol_type = other RNA
ttcccccaggtgtacatgttcctggtgaaatggcaggacctgtcggagaaggtggtctaccggagattca

SEQ ID NO: 29186 - RNA, 70 nt, synthetic construct
  source 1..70: mol_type = other RNA
ttcccccaggtgtacatgttcctggtgaaatggcaggacctgtcggagaaggtggtctaccggaggttca

SEQ ID NO: 29187 - RNA, 70 nt, synthetic construct
  source 1..70: mol_type = other RNA
ttcccccaggtgtacatgttcctggtgaaatggcaggacctgtcggagaaggtggtctaccggcgattca

SEQ ID NO: 29188 - RNA, 70 nt, synthetic construct
  source 1..70: mol_type = other RNA
ttcccccaggtgtacatgttcctggtgaaatggcaggacctgtcggagaaggtggtctaccggcggttca

SEQ ID NO: 29189 - RNA, 70 nt, synthetic construct
  source 1..70: mol_type = other RNA
ttcccccaggtctacatgttcctggtgaaatggcaggacctgtcggagaaggtggtctaccggcgcttca

SEQ ID NO: 29190 - RNA, 70 nt, synthetic construct
  source 1..70: mol_type = other RNA
ttcccccaggtgtacatgttcctggtgaaatggcaggacctgtcggagaaggtggtctaccggcgtttca

SEQ ID NO: 29191 - RNA, 70 nt, synthetic construct
  source 1..70: mol_type = other RNA
ttcccccaggtttacatgttcctggtgaaatggcaggacctgtcggagaaggtggtctaccggagattca

SEQ ID NO: 29192 - RNA, 70 nt, synthetic construct
  source 1..70: mol_type = other RNA
ttcccccaggtttacatgttcctggtgaaatggcaggacctgtcggagaaggtggtctaccggaggttca

SEQ ID NO: 29193 - RNA, 70 nt, synthetic construct
  source 1..70: mol_type = other RNA
ttcccccaggtttacatgttcctggtgaaatggcaggacctgtcggagaaggtggtctaccggcgattca

SEQ ID NO: 29194 - RNA, 70 nt, synthetic construct
  source 1..70: mol_type = other RNA
ttcccccaggtttacatgttcctggtgaaatggcaggacctgtcggagaaggtggtctaccggcggttca

SEQ ID NO: 29195 - RNA, 70 nt, synthetic construct
  source 1..70: mol_type = other RNA
ttcccccaggtatacatgttcctggtgaaatggcaggacctgtcggagaaggtggtctaccggcgtttca

SEQ ID NO: 29196 - RNA, 70 nt, synthetic construct
  source 1..70: mol_type = other RNA
ttcccccaggtctacatgttcctggtgaaatggcaggacctgtcggagaaggtggtctaccggcggttca

SEQ ID NO: 29197 - RNA, 71 nt, synthetic construct
  source 1..71: mol_type = other RNA
tttcccccaggtgtacatgttcctggtgaaatggcaggacctgtcggagaaggtggtctaccggcggttca

SEQ ID NO: 29198 - RNA, 71 nt, synthetic construct
  source 1..71: mol_type = other RNA
tttcccccaggtttacatgttcctggtgaaatggcaggacctgtcggagaaggtggtctaccggcggttca

SEQ ID NO: 29199 - RNA, 71 nt, synthetic construct
  source 1..71: mol_type = other RNA
tttcccccaggtctacatgttcctggtgaaatggcaggacctgtcggagaaggtggtctaccggagattca

SEQ ID NO: 29200 - RNA, 71 nt, synthetic construct
  source 1..71: mol_type = other RNA
tttcccccaggtttacatgttcctggtgaaatggcaggacctgtcggagaaggtggtctaccggcgcttca

SEQ ID NO: 29201 - RNA, 71 nt, synthetic construct
  source 1..71: mol_type = other RNA
tttcccccaggtatacatgttcctggtgaaatggcaggacctgtcggagaaggtggtctaccggaggttca

SEQ ID NO: 29202 - RNA, 71 nt, synthetic construct
  source 1..71: mol_type = other RNA
tttcccccaggtatacatgttcctggtgaaatggcaggacctgtcggagaaggtggtctaccggcgattca

SEQ ID NO: 29203 - RNA, 71 nt, synthetic construct
  source 1..71: mol_type = other RNA
tttcccccaggtatacatgttcctggtgaaatggcaggacctgtcggagaaggtggtctaccggcgcttca

SEQ ID NO: 29204 - RNA, 71 nt, synthetic construct
  source 1..71: mol_type = other RNA
tttcccccaggtatacatgttcctggtgaaatggcaggacctgtcggagaaggtggtctaccggcggttca

SEQ ID NO: 29205 - RNA, 71 nt, synthetic construct
  source 1..71: mol_type = other RNA
tttcccccaggtatacatgttcctggtgaaatggcaggacctgtcggagaaggtggtctaccggcgtttca

SEQ ID NO: 29206 - RNA, 71 nt, synthetic construct
  source 1..71: mol_type = other RNA
tttcccccaggtctacatgttcctggtgaaatggcaggacctgtcggagaaggtggtctaccggaggttca

SEQ ID NO: 29207 - RNA, 71 nt, synthetic construct
  source 1..71: mol_type = other RNA
tttcccccaggtctacatgttcctggtgaaatggcaggacctgtcggagaaggtggtctaccggcgattca

SEQ ID NO: 29208 - RNA, 71 nt, synthetic construct
  source 1..71: mol_type = other RNA
tttcccccaggtctacatgttcctggtgaaatggcaggacctgtcggagaaggtggtctaccggcggttca

SEQ ID NO: 29209 - RNA, 71 nt, synthetic construct
  source 1..71: mol_type = other RNA
tttcccccaggtctacatgttcctggtgaaatggcaggacctgtcggagaaggtggtctaccggcgcttca

SEQ ID NO: 29210 - RNA, 71 nt, synthetic construct
  source 1..71: mol_type = other RNA
tttcccccaggtgtacatgttcctggtgaaatggcaggacctgtcggagaaggtggtctaccggagattca

SEQ ID NO: 29211 - RNA, 71 nt, synthetic construct
  source 1..71: mol_type = other RNA
tttcccccaggtgtacatgttcctggtgaaatggcaggacctgtcggagaaggtggtctaccggaggttca

SEQ ID NO: 29212 - RNA, 71 nt, synthetic construct
  source 1..71: mol_type = other RNA
tttcccccaggtgtacatgttcctggtgaaatggcaggacctgtcggagaaggtggtctaccggcgattca

SEQ ID NO: 29213 - RNA, 71 nt, synthetic construct
  source 1..71: mol_type = other RNA
tttcccccaggtgtacatgttcctggtgaaatggcaggacctgtcggagaaggtggtctaccggcgcttca

SEQ ID NO: 29214 - RNA, 71 nt, synthetic construct
  source 1..71: mol_type = other RNA
tttcccccaggtgtacatgttcctggtgaaatggcaggacctgtcggagaaggtggtctaccggcgtttca

SEQ ID NO: 29215 - RNA, 71 nt, synthetic construct
  source 1..71: mol_type = other RNA
tttcccccaggtttacatgttcctggtgaaatggcaggacctgtcggagaaggtggtctaccggagattca

SEQ ID NO: 29216 - RNA, 71 nt, synthetic construct
  source 1..71: mol_type = other RNA
tttcccccaggtttacatgttcctggtgaaatggcaggacctgtcggagaaggtggtctaccggaggttca

SEQ ID NO: 29217 - RNA, 71 nt, synthetic construct
  source 1..71: mol_type = other RNA
tttcccccaggtatacatgttcctggtgaaatggcaggacctgtcggagaaggtggtctaccggagattca

SEQ ID NO: 29218 - RNA, 71 nt, synthetic construct
  source 1..71: mol_type = other RNA
tttcccccaggtttacatgttcctggtgaaatggcaggacctgtcggagaaggtggtctaccggcgattca

SEQ ID NO: 29219 - RNA, 71 nt, synthetic construct
  source 1..71: mol_type = other RNA
tttcccccaggtttacatgttcctggtgaaatggcaggacctgtcggagaaggtggtctaccggcgtttca

SEQ ID NO: 29220 - RNA, 71 nt, synthetic construct
  source 1..71: mol_type = other RNA
tttcccccaggtctacatgttcctggtgaaatggcaggacctgtcggagaaggtggtctaccggcgtttca

SEQ ID NO: 29221 - RNA, 72 nt, synthetic construct
  source 1..72: mol_type = other RNA
ctttcccccaggtgtacatgttcctggtgaaatggcaggacctgtcggagaaggtggtctaccggcggttca

SEQ ID NO: 29222 - RNA, 72 nt, synthetic construct
  source 1..72: mol_type = other RNA
ctttcccccaggtctacatgttcctggtgaaatggcaggacctgtcggagaaggtggtctaccggcgcttca

SEQ ID NO: 29223 - RNA, 72 nt, synthetic construct
  source 1..72: mol_type = other RNA
ctttcccccaggtatacatgttcctggtgaaatggcaggacctgtcggagaaggtggtctaccggcggttca

SEQ ID NO: 29224 - RNA, 72 nt, synthetic construct
  source 1..72: mol_type = other RNA
ctttcccccaggtttacatgttcctggtgaaatggcaggacctgtcggagaaggtggtctaccggcggttca

SEQ ID NO: 29225 - RNA, 72 nt, synthetic construct
  source 1..72: mol_type = other RNA
ctttcccccaggtatacatgttcctggtgaaatggcaggacctgtcggagaaggtggtctaccggaggttca

SEQ ID NO: 29226 - RNA, 72 nt, synthetic construct
  source 1..72: mol_type = other RNA
ctttcccccaggtctacatgttcctggtgaaatggcaggacctgtcggagaaggtggtctaccggcggttca

SEQ ID NO: 29227 - RNA, 72 nt, synthetic construct
  source 1..72: mol_type = other RNA
ctttcccccaggtatacatgttcctggtgaaatggcaggacctgtcggagaaggtggtctaccggcgattca

SEQ ID NO: 29228 - RNA, 72 nt, synthetic construct
  source 1..72: mol_type = other RNA
ctttcccccaggtatacatgttcctggtgaaatggcaggacctgtcggagaaggtggtctaccggcgcttca

SEQ ID NO: 29229 - RNA, 72 nt, synthetic construct
  source 1..72: mol_type = other RNA
ctttcccccaggtctacatgttcctggtgaaatggcaggacctgtcggagaaggtggtctaccggcgtttca

SEQ ID NO: 29230 - RNA, 72 nt, synthetic construct
  source 1..72: mol_type = other RNA
ctttcccccaggtatacatgttcctggtgaaatggcaggacctgtcggagaaggtggtctaccggcgtttca

SEQ ID NO: 29231 - RNA, 72 nt, synthetic construct
  source 1..72: mol_type = other RNA
ctttcccccaggtctacatgttcctggtgaaatggcaggacctgtcggagaaggtggtctaccggagattca

SEQ ID NO: 29232 - RNA, 72 nt, synthetic construct
  source 1..72: mol_type = other RNA
ctttcccccaggtctacatgttcctggtgaaatggcaggacctgtcggagaaggtggtctaccggcgattca

SEQ ID NO: 29233 - RNA, 72 nt, synthetic construct
  source 1..72: mol_type = other RNA
ctttcccccaggtttacatgttcctggtgaaatggcaggacctgtcggagaaggtggtctaccggcgtttca

SEQ ID NO: 29234 - RNA, 72 nt, synthetic construct
  source 1..72: mol_type = other RNA
ctttcccccaggtctacatgttcctggtgaaatggcaggacctgtcggagaaggtggtctaccggaggttca

SEQ ID NO: 29235 - RNA, 72 nt, synthetic construct
  source 1..72: mol_type = other RNA
ctttcccccaggtgtacatgttcctggtgaaatggcaggacctgtcggagaaggtggtctaccggcgattca

SEQ ID NO: 29236 - RNA, 72 nt, synthetic construct
  source 1..72: mol_type = other RNA
ctttcccccaggtgtacatgttcctggtgaaatggcaggacctgtcggagaaggtggtctaccggcgtttca

SEQ ID NO: 29237 - RNA, 72 nt, synthetic construct
  source 1..72: mol_type = other RNA
ctttcccccaggtatacatgttcctggtgaaatggcaggacctgtcggagaaggtggtctaccggagattca

SEQ ID NO: 29238 - RNA, 72 nt, synthetic construct
  source 1..72: mol_type = other RNA
ctttcccccaggtttacatgttcctggtgaaatggcaggacctgtcggagaaggtggtctaccggcgattca

SEQ ID NO: 29239 - RNA, 72 nt, synthetic construct
  source 1..72: mol_type = other RNA
ctttcccccaggtttacatgttcctggtgaaatggcaggacctgtcggagaaggtggtctaccggagattca

SEQ ID NO: 29240 - RNA, 72 nt, synthetic construct
  source 1..72: mol_type = other RNA
ctttcccccaggtttacatgttcctggtgaaatggcaggacctgtcggagaaggtggtctaccggaggttca

SEQ ID NO: 29241 - RNA, 72 nt, synthetic construct
  source 1..72: mol_type = other RNA
ctttcccccaggtttacatgttcctggtgaaatggcaggacctgtcggagaaggtggtctaccggcgcttca

SEQ ID NO: 29242 - RNA, 72 nt, synthetic construct
  source 1..72: mol_type = other RNA
ctttcccccaggtgtacatgttcctggtgaaatggcaggacctgtcggagaaggtggtctaccggcgcttca

SEQ ID NO: 29243 - RNA, 72 nt, synthetic construct
  source 1..72: mol_type = other RNA
ctttcccccaggtgtacatgttcctggtgaaatggcaggacctgtcggagaaggtggtctaccggagattca

SEQ ID NO: 29244 - RNA, 72 nt, synthetic construct
  source 1..72: mol_type = other RNA
ctttcccccaggtgtacatgttcctggtgaaatggcaggacctgtcggagaaggtggtctaccggaggttca

SEQ ID NO: 29245 - RNA, 73 nt, synthetic construct
  source 1..73: mol_type = other RNA
gctttcccccaggtttacatgttcctggtgaaatggcaggacctgtcggagaaggtggtctaccggcgattca

SEQ ID NO: 29246 - RNA, 73 nt, synthetic construct
  source 1..73: mol_type = other RNA
gctttcccccaggtgtacatgttcctggtgaaatggcaggacctgtcggagaaggtggtctaccggcgtttca

SEQ ID NO: 29247 - RNA, 73 nt, synthetic construct
  source 1..73: mol_type = other RNA
gctttcccccaggtttacatgttcctggtgaaatggcaggacctgtcggagaaggtggtctaccggcggttca

SEQ ID NO: 29248 - RNA, 73 nt, synthetic construct
  source 1..73: mol_type = other RNA
gctttcccccaggtttacatgttcctggtgaaatggcaggacctgtcggagaaggtggtctaccggagattca

SEQ ID NO: 29249 - RNA, 73 nt, synthetic construct
  source 1..73: mol_type = other RNA
gctttcccccaggtatacatgttcctggtgaaatggcaggacctgtcggagaaggtggtctaccggagattca

SEQ ID NO: 29250 - RNA, 73 nt, synthetic construct
  source 1..73: mol_type = other RNA
gctttcccccaggtttacatgttcctggtgaaatggcaggacctgtcggagaaggtggtctaccggcgtttca

SEQ ID NO: 29251 - RNA, 73 nt, synthetic construct
  source 1..73: mol_type = other RNA
gctttcccccaggtatacatgttcctggtgaaatggcaggacctgtcggagaaggtggtctaccggcggttca

SEQ ID NO: 29252 - RNA, 73 nt, synthetic construct
  source 1..73: mol_type = other RNA
gctttcccccaggtctacatgttcctggtgaaatggcaggacctgtcggagaaggtggtctaccggcgattca

SEQ ID NO: 29253 - RNA, 73 nt, synthetic construct
  source 1..73: mol_type = other RNA
gctttcccccaggtttacatgttcctggtgaaatggcaggacctgtcggagaaggtggtctaccggcgcttca

SEQ ID NO: 29254 - RNA, 73 nt, synthetic construct
  source 1..73: mol_type = other RNA
gctttcccccaggtttacatgttcctggtgaaatggcaggacctgtcggagaaggtggtctaccggaggttca

SEQ ID NO: 29255 - RNA, 73 nt, synthetic construct
  source 1..73: mol_type = other RNA
gctttcccccaggtatacatgttcctggtgaaatggcaggacctgtcggagaaggtggtctaccggaggttca

SEQ ID NO: 29256 - RNA, 73 nt, synthetic construct
  source 1..73: mol_type = other RNA
gctttcccccaggtctacatgttcctggtgaaatggcaggacctgtcggagaaggtggtctaccggcggttca

SEQ ID NO: 29257 - RNA, 73 nt, synthetic construct
  source 1..73: mol_type = other RNA
gctttcccccaggtatacatgttcctggtgaaatggcaggacctgtcggagaaggtggtctaccggcgcttca

SEQ ID NO: 29258 - RNA, 73 nt, synthetic construct
  source 1..73: mol_type = other RNA
gctttcccccaggtatacatgttcctggtgaaatggcaggacctgtcggagaaggtggtctaccggcgtttca

SEQ ID NO: 29259 - RNA, 73 nt, synthetic construct
  source 1..73: mol_type = other RNA
gctttcccccaggtctacatgttcctggtgaaatggcaggacctgtcggagaaggtggtctaccggaggttca

SEQ ID NO: 29260 - RNA, 73 nt, synthetic construct
  source 1..73: mol_type = other RNA
gctttcccccaggtctacatgttcctggtgaaatggcaggacctgtcggagaaggtggtctaccggagattca

SEQ ID NO: 29261 - RNA, 73 nt, synthetic construct
  source 1..73: mol_type = other RNA
gctttcccccaggtctacatgttcctggtgaaatggcaggacctgtcggagaaggtggtctaccggcgcttca

SEQ ID NO: 29262 - RNA, 73 nt, synthetic construct
  source 1..73: mol_type = other RNA
gctttcccccaggtctacatgttcctggtgaaatggcaggacctgtcggagaaggtggtctaccggcgtttca

SEQ ID NO: 29263 - RNA, 73 nt, synthetic construct
  source 1..73: mol_type = other RNA
gctttcccccaggtgtacatgttcctggtgaaatggcaggacctgtcggagaaggtggtctaccggagattca

SEQ ID NO: 29264 - RNA, 73 nt, synthetic construct
  source 1..73: mol_type = other RNA
gctttcccccaggtgtacatgttcctggtgaaatggcaggacctgtcggagaaggtggtctaccggaggttca

SEQ ID NO: 29265 - RNA, 73 nt, synthetic construct
  source 1..73: mol_type = other RNA
gctttcccccaggtgtacatgttcctggtgaaatggcaggacctgtcggagaaggtggtctaccggcgattca

SEQ ID NO: 29266 - RNA, 73 nt, synthetic construct
  source 1..73: mol_type = other RNA
gctttcccccaggtgtacatgttcctggtgaaatggcaggacctgtcggagaaggtggtctaccggcgcttca

SEQ ID NO: 29267 - RNA, 73 nt, synthetic construct
  source 1..73: mol_type = other RNA
gctttcccccaggtatacatgttcctggtgaaatggcaggacctgtcggagaaggtggtctaccggcgattca

SEQ ID NO: 29268 - RNA, 73 nt, synthetic construct
  source 1..73: mol_type = other RNA
gctttcccccaggtgtacatgttcctggtgaaatggcaggacctgtcggagaaggtggtctaccggcggttca

SEQ ID NO: 29269 - RNA, 74 nt, synthetic construct
  source 1..74: mol_type = other RNA
ggctttcccccaggtgtacatgttcctggtgaaatggcaggacctgtcggagaaggtggtctaccggcgattca

SEQ ID NO: 29270 - RNA, 74 nt, synthetic construct
  source 1..74: mol_type = other RNA
ggctttcccccaggtatacatgttcctggtgaaatggcaggacctgtcggagaaggtggtctaccggagattca

SEQ ID NO: 29271 - RNA, 74 nt, synthetic construct
  source 1..74: mol_type = other RNA
ggctttcccccaggtttacatgttcctggtgaaatggcaggacctgtcggagaaggtggtctaccggcgtttca

SEQ ID NO: 29272 - RNA, 74 nt, synthetic construct
  source 1..74: mol_type = other RNA
ggctttcccccaggtttacatgttcctggtgaaatggcaggacctgtcggagaaggtggtctaccggcgcttca

SEQ ID NO: 29273 - RNA, 74 nt, synthetic construct
  source 1..74: mol_type = other RNA
ggctttcccccaggtttacatgttcctggtgaaatggcaggacctgtcggagaaggtggtctaccggcggttca

SEQ ID NO: 29274 - RNA, 74 nt, synthetic construct
  source 1..74: mol_type = other RNA
ggctttcccccaggtgtacatgttcctggtgaaatggcaggacctgtcggagaaggtggtctaccggagattca

SEQ ID NO: 29275 - RNA, 74 nt, synthetic construct
  source 1..74: mol_type = other RNA
ggctttcccccaggtatacatgttcctggtgaaatggcaggacctgtcggagaaggtggtctaccggcgtttca

SEQ ID NO: 29276 - RNA, 74 nt, synthetic construct
  source 1..74: mol_type = other RNA
ggctttcccccaggtctacatgttcctggtgaaatggcaggacctgtcggagaaggtggtctaccggcggttca

SEQ ID NO: 29277 - RNA, 74 nt, synthetic construct
  source 1..74: mol_type = other RNA
ggctttcccccaggtgtacatgttcctggtgaaatggcaggacctgtcggagaaggtggtctaccggaggttca

SEQ ID NO: 29278 - RNA, 74 nt, synthetic construct
  source 1..74: mol_type = other RNA
ggctttcccccaggtatacatgttcctggtgaaatggcaggacctgtcggagaaggtggtctaccggaggttca

SEQ ID NO: 29279 - RNA, 74 nt, synthetic construct
  source 1..74: mol_type = other RNA
ggctttcccccaggtatacatgttcctggtgaaatggcaggacctgtcggagaaggtggtctaccggcgcttca

SEQ ID NO: 29280 - RNA, 74 nt, synthetic construct
  source 1..74: mol_type = other RNA
ggctttcccccaggtttacatgttcctggtgaaatggcaggacctgtcggagaaggtggtctaccggaggttca

SEQ ID NO: 29281 - RNA, 74 nt, synthetic construct
  source 1..74: mol_type = other RNA
ggctttcccccaggtatacatgttcctggtgaaatggcaggacctgtcggagaaggtggtctaccggcgattca

SEQ ID NO: 29282 - RNA, 74 nt, synthetic construct
  source 1..74: mol_type = other RNA
ggctttcccccaggtttacatgttcctggtgaaatggcaggacctgtcggagaaggtggtctaccggagattca

SEQ ID NO: 29283 - RNA, 74 nt, synthetic construct
  source 1..74: mol_type = other RNA
ggctttcccccaggtgtacatgttcctggtgaaatggcaggacctgtcggagaaggtggtctaccggcgtttca

SEQ ID NO: 29284 - RNA, 74 nt, synthetic construct
  source 1..74: mol_type = other RNA
ggctttcccccaggtgtacatgttcctggtgaaatggcaggacctgtcggagaaggtggtctaccggcgcttca

SEQ ID NO: 29285 - RNA, 74 nt, synthetic construct
  source 1..74: mol_type = other RNA
ggctttcccccaggtctacatgttcctggtgaaatggcaggacctgtcggagaaggtggtctaccggcgcttca

SEQ ID NO: 29286 - RNA, 74 nt, synthetic construct
  source 1..74: mol_type = other RNA
ggctttcccccaggtgtacatgttcctggtgaaatggcaggacctgtcggagaaggtggtctaccggcggttca

SEQ ID NO: 29287 - RNA, 74 nt, synthetic construct
  source 1..74: mol_type = other RNA
ggctttcccccaggtttacatgttcctggtgaaatggcaggacctgtcggagaaggtggtctaccggcgattca

SEQ ID NO: 29288 - RNA, 74 nt, synthetic construct
  source 1..74: mol_type = other RNA
ggctttcccccaggtctacatgttcctggtgaaatggcaggacctgtcggagaaggtggtctaccggcgattca

SEQ ID NO: 29289 - RNA, 74 nt, synthetic construct
  source 1..74: mol_type = other RNA
ggctttcccccaggtctacatgttcctggtgaaatggcaggacctgtcggagaaggtggtctaccggaggttca

SEQ ID NO: 29290 - RNA, 74 nt, synthetic construct
  source 1..74: mol_type = other RNA
ggctttcccccaggtctacatgttcctggtgaaatggcaggacctgtcggagaaggtggtctaccggagattca

SEQ ID NO: 29291 - RNA, 74 nt, synthetic construct
  source 1..74: mol_type = other RNA
ggctttcccccaggtatacatgttcctggtgaaatggcaggacctgtcggagaaggtggtctaccggcggttca

SEQ ID NO: 29292 - RNA, 74 nt, synthetic construct
  source 1..74: mol_type = other RNA
ggctttcccccaggtctacatgttcctggtgaaatggcaggacctgtcggagaaggtggtctaccggcgtttca

SEQ ID NO: 29293 - RNA, 75 nt, synthetic construct
  source 1..75: mol_type = other RNA
tggctttcccccaggtatacatgttcctggtgaaatggcaggacctgtcggagaaggtggtctaccggcgtttca

SEQ ID NO: 29294 - RNA, 75 nt, synthetic construct
  source 1..75: mol_type = other RNA
tggctttcccccaggtctacatgttcctggtgaaatggcaggacctgtcggagaaggtggtctaccggcgattca

SEQ ID NO: 29295 - RNA, 75 nt, synthetic construct
  source 1..75: mol_type = other RNA
tggctttcccccaggtctacatgttcctggtgaaatggcaggacctgtcggagaaggtggtctaccggaggttca

SEQ ID NO: 29296 - RNA, 75 nt, synthetic construct
  source 1..75: mol_type = other RNA
tggctttcccccaggtctacatgttcctggtgaaatggcaggacctgtcggagaaggtggtctaccggagattca

SEQ ID NO: 29297 - RNA, 75 nt, synthetic construct
  source 1..75: mol_type = other RNA
tggctttcccccaggtatacatgttcctggtgaaatggcaggacctgtcggagaaggtggtctaccggcgcttca

SEQ ID NO: 29298 - RNA, 75 nt, synthetic construct
  source 1..75: mol_type = other RNA
tggctttcccccaggtatacatgttcctggtgaaatggcaggacctgtcggagaaggtggtctaccggcggttca

SEQ ID NO: 29299 - RNA, 75 nt, synthetic construct
  source 1..75: mol_type = other RNA
tggctttcccccaggtatacatgttcctggtgaaatggcaggacctgtcggagaaggtggtctaccggaggttca

SEQ ID NO: 29300 - RNA, 75 nt, synthetic construct
  source 1..75: mol_type = other RNA
tggctttcccccaggtatacatgttcctggtgaaatggcaggacctgtcggagaaggtggtctaccggagattca

SEQ ID NO: 29301 - RNA, 75 nt, synthetic construct
  source 1..75: mol_type = other RNA
tggctttcccccaggtctacatgttcctggtgaaatggcaggacctgtcggagaaggtggtctaccggcggttca

SEQ ID NO: 29302 - RNA, 75 nt, synthetic construct
  source 1..75: mol_type = other RNA
tggctttcccccaggtctacatgttcctggtgaaatggcaggacctgtcggagaaggtggtctaccggcgcttca

SEQ ID NO: 29303 - RNA, 75 nt, synthetic construct
  source 1..75: mol_type = other RNA
tggctttcccccaggtatacatgttcctggtgaaatggcaggacctgtcggagaaggtggtctaccggcgattca

SEQ ID NO: 29304 - RNA, 75 nt, synthetic construct
  source 1..75: mol_type = other RNA
tggctttcccccaggtgtacatgttcctggtgaaatggcaggacctgtcggagaaggtggtctaccggagattca

SEQ ID NO: 29305 - RNA, 75 nt, synthetic construct
  source 1..75: mol_type = other RNA
tggctttcccccaggtttacatgttcctggtgaaatggcaggacctgtcggagaaggtggtctaccggaggttca

SEQ ID NO: 29306 - RNA, 75 nt, synthetic construct
  source 1..75: mol_type = other RNA
tggctttcccccaggtgtacatgttcctggtgaaatggcaggacctgtcggagaaggtggtctaccggaggttca

SEQ ID NO: 29307 - RNA, 75 nt, synthetic construct
  source 1..75: mol_type = other RNA
tggctttcccccaggtctacatgttcctggtgaaatggcaggacctgtcggagaaggtggtctaccggcgtttca

SEQ ID NO: 29308 - RNA, 75 nt, synthetic construct
  source 1..75: mol_type = other RNA
tggctttcccccaggtgtacatgttcctggtgaaatggcaggacctgtcggagaaggtggtctaccggcgcttca

SEQ ID NO: 29309 - RNA, 75 nt, synthetic construct
  source 1..75: mol_type = other RNA
tggctttcccccaggtgtacatgttcctggtgaaatggcaggacctgtcggagaaggtggtctaccggcgtttca

SEQ ID NO: 29310 - RNA, 75 nt, synthetic construct
  source 1..75: mol_type = other RNA
tggctttcccccaggtttacatgttcctggtgaaatggcaggacctgtcggagaaggtggtctaccggcggttca

SEQ ID NO: 29311 - RNA, 75 nt, synthetic construct
  source 1..75: mol_type = other RNA
tggctttcccccaggtttacatgttcctggtgaaatggcaggacctgtcggagaaggtggtctaccggcgcttca

SEQ ID NO: 29312 - RNA, 75 nt, synthetic construct
  source 1..75: mol_type = other RNA
tggctttcccccaggtttacatgttcctggtgaaatggcaggacctgtcggagaaggtggtctaccggcgtttca

SEQ ID NO: 29313 - RNA, 75 nt, synthetic construct
  source 1..75: mol_type = other RNA
tggctttcccccaggtttacatgttcctggtgaaatggcaggacctgtcggagaaggtggtctaccggagattca

SEQ ID NO: 29314 - RNA, 75 nt, synthetic construct
  source 1..75: mol_type = other RNA
tggctttcccccaggtgtacatgttcctggtgaaatggcaggacctgtcggagaaggtggtctaccggcggttca

SEQ ID NO: 29315 - RNA, 75 nt, synthetic construct
  source 1..75: mol_type = other RNA
tggctttcccccaggtgtacatgttcctggtgaaatggcaggacctgtcggagaaggtggtctaccggcgattca

SEQ ID NO: 29316 - RNA, 75 nt, synthetic construct
  source 1..75: mol_type = other RNA
tggctttcccccaggtttacatgttcctggtgaaatggcaggacctgtcggagaaggtggtctaccggcgattca

SEQ ID NO: 29317 - RNA, 76 nt, synthetic construct
  source 1..76: mol_type = other RNA
ctggctttcccccaggtttacatgttcctggtgaaatggcaggacctgtcggagaaggtggtctaccggcgcttca

SEQ ID NO: 29318 - RNA, 76 nt, synthetic construct
  source 1..76: mol_type = other RNA
ctggctttcccccaggtgtacatgttcctggtgaaatggcaggacctgtcggagaaggtggtctaccggcgattca

SEQ ID NO: 29319 - RNA, 76 nt, synthetic construct
  source 1..76: mol_type = other RNA
ctggctttcccccaggtttacatgttcctggtgaaatggcaggacctgtcggagaaggtggtctaccggaggttca

SEQ ID NO: 29320 - RNA, 76 nt, synthetic construct
  source 1..76: mol_type = other RNA
ctggctttcccccaggtgtacatgttcctggtgaaatggcaggacctgtcggagaaggtggtctaccggcggttca

SEQ ID NO: 29321 - RNA, 76 nt, synthetic construct
  source 1..76: mol_type = other RNA
ctggctttcccccaggtgtacatgttcctggtgaaatggcaggacctgtcggagaaggtggtctaccggcgcttca

SEQ ID NO: 29322 - RNA, 76 nt, synthetic construct
  source 1..76: mol_type = other RNA
ctggctttcccccaggtttacatgttcctggtgaaatggcaggacctgtcggagaaggtggtctaccggagattca

SEQ ID NO: 29323 - RNA, 76 nt, synthetic construct
  source 1..76: mol_type = other RNA
ctggctttcccccaggtatacatgttcctggtgaaatggcaggacctgtcggagaaggtggtctaccggcgtttca

SEQ ID NO: 29324 - RNA, 76 nt, synthetic construct
  source 1..76: mol_type = other RNA
ctggctttcccccaggtgtacatgttcctggtgaaatggcaggacctgtcggagaaggtggtctaccggcgtttca

SEQ ID NO: 29325 - RNA, 76 nt, synthetic construct
  source 1..76: mol_type = other RNA
ctggctttcccccaggtctacatgttcctggtgaaatggcaggacctgtcggagaaggtggtctaccggcggttca

SEQ ID NO: 29326 - RNA, 76 nt, synthetic construct
  source 1..76: mol_type = other RNA
ctggctttcccccaggtctacatgttcctggtgaaatggcaggacctgtcggagaaggtggtctaccggcgtttca

SEQ ID NO: 29327 - RNA, 76 nt, synthetic construct
  source 1..76: mol_type = other RNA
ctggctttcccccaggtctacatgttcctggtgaaatggcaggacctgtcggagaaggtggtctaccggcgattca

SEQ ID NO: 29328 - RNA, 76 nt, synthetic construct
  source 1..76: mol_type = other RNA
ctggctttcccccaggtatacatgttcctggtgaaatggcaggacctgtcggagaaggtggtctaccggaggttca

SEQ ID NO: 29329 - RNA, 76 nt, synthetic construct
  source 1..76: mol_type = other RNA
ctggctttcccccaggtatacatgttcctggtgaaatggcaggacctgtcggagaaggtggtctaccggcgattca

SEQ ID NO: 29330 - RNA, 76 nt, synthetic construct
  source 1..76: mol_type = other RNA
ctggctttcccccaggtatacatgttcctggtgaaatggcaggacctgtcggagaaggtggtctaccggcgcttca

SEQ ID NO: 29331 - RNA, 76 nt, synthetic construct
  source 1..76: mol_type = other RNA
ctggctttcccccaggtatacatgttcctggtgaaatggcaggacctgtcggagaaggtggtctaccggcggttca

SEQ ID NO: 29332 - RNA, 76 nt, synthetic construct
  source 1..76: mol_type = other RNA
ctggctttcccccaggtctacatgttcctggtgaaatggcaggacctgtcggagaaggtggtctaccggcgcttca

SEQ ID NO: 29333 - RNA, 76 nt, synthetic construct
  source 1..76: mol_type = other RNA
ctggctttcccccaggtctacatgttcctggtgaaatggcaggacctgtcggagaaggtggtctaccggagattca

SEQ ID NO: 29334 - RNA, 76 nt, synthetic construct
  source 1..76: mol_type = other RNA
ctggctttcccccaggtctacatgttcctggtgaaatggcaggacctgtcggagaaggtggtctaccggaggttca

SEQ ID NO: 29335 - RNA, 76 nt, synthetic construct
  source 1..76: mol_type = other RNA
ctggctttcccccaggtatacatgttcctggtgaaatggcaggacctgtcggagaaggtggtctaccggagattca

SEQ ID NO: 29336 - RNA, 76 nt, synthetic construct
  source 1..76: mol_type = other RNA
ctggctttcccccaggtttacatgttcctggtgaaatggcaggacctgtcggagaaggtggtctaccggcgtttca

SEQ ID NO: 29337 - RNA, 76 nt, synthetic construct
  source 1..76: mol_type = other RNA
ctggctttcccccaggtgtacatgttcctggtgaaatggcaggacctgtcggagaaggtggtctaccggaggttca

SEQ ID NO: 29338 - RNA, 76 nt, synthetic construct
  source 1..76: mol_type = other RNA
ctggctttcccccaggtttacatgttcctggtgaaatggcaggacctgtcggagaaggtggtctaccggcggttca

SEQ ID NO: 29339 - RNA, 76 nt, synthetic construct
  source 1..76: mol_type = other RNA
ctggctttcccccaggtttacatgttcctggtgaaatggcaggacctgtcggagaaggtggtctaccggcgattca

SEQ ID NO: 29340 - RNA, 76 nt, synthetic construct
  source 1..76: mol_type = other RNA
ctggctttcccccaggtgtacatgttcctggtgaaatggcaggacctgtcggagaaggtggtctaccggagattca

SEQ ID NO: 29341 - RNA, 77 nt, synthetic construct
  source 1..77: mol_type = other RNA
tctggctttcccccaggtttacatgttcctggtgaaatggcaggacctgtcggagaaggtggtctaccggaggttca

SEQ ID NO: 29342 - RNA, 77 nt, synthetic construct
  source 1..77: mol_type = other RNA
tctggctttcccccaggtttacatgttcctggtgaaatggcaggacctgtcggagaaggtggtctaccggcgattca

SEQ ID NO: 29343 - RNA, 77 nt, synthetic construct
  source 1..77: mol_type = other RNA
tctggctttcccccaggtttacatgttcctggtgaaatggcaggacctgtcggagaaggtggtctaccggcggttca

SEQ ID NO: 29344 - RNA, 77 nt, synthetic construct
  source 1..77: mol_type = other RNA
tctggctttcccccaggtttacatgttcctggtgaaatggcaggacctgtcggagaaggtggtctaccggcgcttca

SEQ ID NO: 29345 - RNA, 77 nt, synthetic construct
  source 1..77: mol_type = other RNA
tctggctttcccccaggtgtacatgttcctggtgaaatggcaggacctgtcggagaaggtggtctaccggcgcttca

SEQ ID NO: 29346 - RNA, 77 nt, synthetic construct
  source 1..77: mol_type = other RNA
tctggctttcccccaggtgtacatgttcctggtgaaatggcaggacctgtcggagaaggtggtctaccggcgtttca

SEQ ID NO: 29347 - RNA, 77 nt, synthetic construct
  source 1..77: mol_type = other RNA
tctggctttcccccaggtatacatgttcctggtgaaatggcaggacctgtcggagaaggtggtctaccggcgcttca

SEQ ID NO: 29348 - RNA, 77 nt, synthetic construct
  source 1..77: mol_type = other RNA
tctggctttcccccaggtatacatgttcctggtgaaatggcaggacctgtcggagaaggtggtctaccggaggttca

SEQ ID NO: 29349 - RNA, 77 nt, synthetic construct
  source 1..77: mol_type = other RNA
tctggctttcccccaggtatacatgttcctggtgaaatggcaggacctgtcggagaaggtggtctaccggcgattca

SEQ ID NO: 29350 - RNA, 77 nt, synthetic construct
  source 1..77: mol_type = other RNA
tctggctttcccccaggtttacatgttcctggtgaaatggcaggacctgtcggagaaggtggtctaccggcgtttca

SEQ ID NO: 29351 - RNA, 77 nt, synthetic construct
  source 1..77: mol_type = other RNA
tctggctttcccccaggtatacatgttcctggtgaaatggcaggacctgtcggagaaggtggtctaccggagattca

SEQ ID NO: 29352 - RNA, 77 nt, synthetic construct
  source 1..77: mol_type = other RNA
tctggctttcccccaggtctacatgttcctggtgaaatggcaggacctgtcggagaaggtggtctaccggcgtttca

SEQ ID NO: 29353 - RNA, 77 nt, synthetic construct
  source 1..77: mol_type = other RNA
tctggctttcccccaggtttacatgttcctggtgaaatggcaggacctgtcggagaaggtggtctaccggagattca

SEQ ID NO: 29354 - RNA, 77 nt, synthetic construct
  source 1..77: mol_type = other RNA
tctggctttcccccaggtatacatgttcctggtgaaatggcaggacctgtcggagaaggtggtctaccggcggttca

SEQ ID NO: 29355 - RNA, 77 nt, synthetic construct
  source 1..77: mol_type = other RNA
tctggctttcccccaggtgtacatgttcctggtgaaatggcaggacctgtcggagaaggtggtctaccggcgattca

SEQ ID NO: 29356 - RNA, 77 nt, synthetic construct
  source 1..77: mol_type = other RNA
tctggctttcccccaggtatacatgttcctggtgaaatggcaggacctgtcggagaaggtggtctaccggcgtttca

SEQ ID NO: 29357 - RNA, 77 nt, synthetic construct
  source 1..77: mol_type = other RNA
tctggctttcccccaggtctacatgttcctggtgaaatggcaggacctgtcggagaaggtggtctaccggagattca

SEQ ID NO: 29358 - RNA, 77 nt, synthetic construct
  source 1..77: mol_type = other RNA
tctggctttcccccaggtctacatgttcctggtgaaatggcaggacctgtcggagaaggtggtctaccggaggttca

SEQ ID NO: 29359 - RNA, 77 nt, synthetic construct
  source 1..77: mol_type = other RNA
tctggctttcccccaggtctacatgttcctggtgaaatggcaggacctgtcggagaaggtggtctaccggcgattca

SEQ ID NO: 29360 - RNA, 77 nt, synthetic construct
  source 1..77: mol_type = other RNA
tctggctttcccccaggtctacatgttcctggtgaaatggcaggacctgtcggagaaggtggtctaccggcgcttca

SEQ ID NO: 29361 - RNA, 77 nt, synthetic construct
  source 1..77: mol_type = other RNA
tctggctttcccccaggtctacatgttcctggtgaaatggcaggacctgtcggagaaggtggtctaccggcggttca

SEQ ID NO: 29362 - RNA, 77 nt, synthetic construct
  source 1..77: mol_type = other RNA
tctggctttcccccaggtgtacatgttcctggtgaaatggcaggacctgtcggagaaggtggtctaccggagattca

SEQ ID NO: 29363 - RNA, 77 nt, synthetic construct
  source 1..77: mol_type = other RNA
tctggctttcccccaggtgtacatgttcctggtgaaatggcaggacctgtcggagaaggtggtctaccggaggttca

SEQ ID NO: 29364 - RNA, 77 nt, synthetic construct
  source 1..77: mol_type = other RNA
tctggctttcccccaggtgtacatgttcctggtgaaatggcaggacctgtcggagaaggtggtctaccggcggttca

SEQ ID NO: 29365 - RNA, 78 nt, synthetic construct
  source 1..78: mol_type = other RNA
ctctggctttcccccaggtttacatgttcctggtgaaatggcaggacctgtcggagaaggtggtctaccggcgtttca

SEQ ID NO: 29366 - RNA, 78 nt, synthetic construct
  source 1..78: mol_type = other RNA
ctctggctttcccccaggtctacatgttcctggtgaaatggcaggacctgtcggagaaggtggtctaccggagattca

SEQ ID NO: 29367 - RNA, 78 nt, synthetic construct
  source 1..78: mol_type = other RNA
ctctggctttcccccaggtatacatgttcctggtgaaatggcaggacctgtcggagaaggtggtctaccggcgtttca

SEQ ID NO: 29368 - RNA, 78 nt, synthetic construct
  source 1..78: mol_type = other RNA
ctctggctttcccccaggtatacatgttcctggtgaaatggcaggacctgtcggagaaggtggtctaccggcggttca

SEQ ID NO: 29369 - RNA, 78 nt, synthetic construct
  source 1..78: mol_type = other RNA
ctctggctttcccccaggtatacatgttcctggtgaaatggcaggacctgtcggagaaggtggtctaccggcgcttca

SEQ ID NO: 29370 - RNA, 78 nt, synthetic construct
  source 1..78: mol_type = other RNA
ctctggctttcccccaggtatacatgttcctggtgaaatggcaggacctgtcggagaaggtggtctaccggcgattca

SEQ ID NO: 29371 - RNA, 78 nt, synthetic construct
  source 1..78: mol_type = other RNA
ctctggctttcccccaggtatacatgttcctggtgaaatggcaggacctgtcggagaaggtggtctaccggaggttca

SEQ ID NO: 29372 - RNA, 78 nt, synthetic construct
  source 1..78: mol_type = other RNA
ctctggctttcccccaggtatacatgttcctggtgaaatggcaggacctgtcggagaaggtggtctaccggagattca

SEQ ID NO: 29373 - RNA, 78 nt, synthetic construct
  source 1..78: mol_type = other RNA
ctctggctttcccccaggtctacatgttcctggtgaaatggcaggacctgtcggagaaggtggtctaccggcggttca

SEQ ID NO: 29374 - RNA, 78 nt, synthetic construct
  source 1..78: mol_type = other RNA
ctctggctttcccccaggtctacatgttcctggtgaaatggcaggacctgtcggagaaggtggtctaccggcgtttca

SEQ ID NO: 29375 - RNA, 78 nt, synthetic construct
  source 1..78: mol_type = other RNA
ctctggctttcccccaggtttacatgttcctggtgaaatggcaggacctgtcggagaaggtggtctaccggcggttca

SEQ ID NO: 29376 - RNA, 78 nt, synthetic construct
  source 1..78: mol_type = other RNA
ctctggctttcccccaggtttacatgttcctggtgaaatggcaggacctgtcggagaaggtggtctaccggcgcttca

SEQ ID NO: 29377 - RNA, 78 nt, synthetic construct
  source 1..78: mol_type = other RNA
ctctggctttcccccaggtttacatgttcctggtgaaatggcaggacctgtcggagaaggtggtctaccggcgattca

SEQ ID NO: 29378 - RNA, 78 nt, synthetic construct
  source 1..78: mol_type = other RNA
ctctggctttcccccaggtctacatgttcctggtgaaatggcaggacctgtcggagaaggtggtctaccggaggttca

SEQ ID NO: 29379 - RNA, 78 nt, synthetic construct
  source 1..78: mol_type = other RNA
ctctggctttcccccaggtttacatgttcctggtgaaatggcaggacctgtcggagaaggtggtctaccggaggttca

SEQ ID NO: 29380 - RNA, 78 nt, synthetic construct
  source 1..78: mol_type = other RNA
ctctggctttcccccaggtgtacatgttcctggtgaaatggcaggacctgtcggagaaggtggtctaccggagattca

SEQ ID NO: 29381 - RNA, 78 nt, synthetic construct
  source 1..78: mol_type = other RNA
ctctggctttcccccaggtgtacatgttcctggtgaaatggcaggacctgtcggagaaggtggtctaccggcgcttca

SEQ ID NO: 29382 - RNA, 78 nt, synthetic construct
  source 1..78: mol_type = other RNA
ctctggctttcccccaggtgtacatgttcctggtgaaatggcaggacctgtcggagaaggtggtctaccggcgattca

SEQ ID NO: 29383 - RNA, 78 nt, synthetic construct
  source 1..78: mol_type = other RNA
ctctggctttcccccaggtgtacatgttcctggtgaaatggcaggacctgtcggagaaggtggtctaccggaggttca

SEQ ID NO: 29384 - RNA, 78 nt, synthetic construct
  source 1..78: mol_type = other RNA
ctctggctttcccccaggtgtacatgttcctggtgaaatggcaggacctgtcggagaaggtggtctaccggcgtttca

SEQ ID NO: 29385 - RNA, 78 nt, synthetic construct
  source 1..78: mol_type = other RNA
ctctggctttcccccaggtttacatgttcctggtgaaatggcaggacctgtcggagaaggtggtctaccggagattca

SEQ ID NO: 29386 - RNA, 78 nt, synthetic construct
  source 1..78: mol_type = other RNA
ctctggctttcccccaggtctacatgttcctggtgaaatggcaggacctgtcggagaaggtggtctaccggcgcttca

SEQ ID NO: 29387 - RNA, 78 nt, synthetic construct
  source 1..78: mol_type = other RNA
ctctggctttcccccaggtctacatgttcctggtgaaatggcaggacctgtcggagaaggtggtctaccggcgattca

SEQ ID NO: 29388 - RNA, 78 nt, synthetic construct
  source 1..78: mol_type = other RNA
ctctggctttcccccaggtgtacatgttcctggtgaaatggcaggacctgtcggagaaggtggtctaccggcggttca

SEQ ID NO: 29389 - RNA, 79 nt, synthetic construct
  source 1..79: mol_type = other RNA
actctggctttcccccaggtttacatgttcctggtgaaatggcaggacctgtcggagaaggtggtctaccggcgattca

SEQ ID NO: 29390 - RNA, 79 nt, synthetic construct
  source 1..79: mol_type = other RNA
actctggctttcccccaggtgtacatgttcctggtgaaatggcaggacctgtcggagaaggtggtctaccggcgtttca

SEQ ID NO: 29391 - RNA, 79 nt, synthetic construct
  source 1..79: mol_type = other RNA
actctggctttcccccaggtgtacatgttcctggtgaaatggcaggacctgtcggagaaggtggtctaccggcgattca

SEQ ID NO: 29392 - RNA, 79 nt, synthetic construct
  source 1..79: mol_type = other RNA
actctggctttcccccaggtttacatgttcctggtgaaatggcaggacctgtcggagaaggtggtctaccggcggttca

SEQ ID NO: 29393 - RNA, 79 nt, synthetic construct
  source 1..79: mol_type = other RNA
actctggctttcccccaggtctacatgttcctggtgaaatggcaggacctgtcggagaaggtggtctaccggcggttca

SEQ ID NO: 29394 - RNA, 79 nt, synthetic construct
  source 1..79: mol_type = other RNA
actctggctttcccccaggtttacatgttcctggtgaaatggcaggacctgtcggagaaggtggtctaccggcgcttca

SEQ ID NO: 29395 - RNA, 79 nt, synthetic construct
  source 1..79: mol_type = other RNA
actctggctttcccccaggtatacatgttcctggtgaaatggcaggacctgtcggagaaggtggtctaccggagattca

SEQ ID NO: 29396 - RNA, 79 nt, synthetic construct
  source 1..79: mol_type = other RNA
actctggctttcccccaggtatacatgttcctggtgaaatggcaggacctgtcggagaaggtggtctaccggaggttca

SEQ ID NO: 29397 - RNA, 79 nt, synthetic construct
  source 1..79: mol_type = other RNA
actctggctttcccccaggtatacatgttcctggtgaaatggcaggacctgtcggagaaggtggtctaccggcgattca

SEQ ID NO: 29398 - RNA, 79 nt, synthetic construct
  source 1..79: mol_type = other RNA
actctggctttcccccaggtatacatgttcctggtgaaatggcaggacctgtcggagaaggtggtctaccggcgcttca

SEQ ID NO: 29399 - RNA, 79 nt, synthetic construct
  source 1..79: mol_type = other RNA
actctggctttcccccaggtatacatgttcctggtgaaatggcaggacctgtcggagaaggtggtctaccggcggttca

SEQ ID NO: 29400 - RNA, 79 nt, synthetic construct
  source 1..79: mol_type = other RNA
actctggctttcccccaggtctacatgttcctggtgaaatggcaggacctgtcggagaaggtggtctaccggagattca

SEQ ID NO: 29401 - RNA, 79 nt, synthetic construct
  source 1..79: mol_type = other RNA
actctggctttcccccaggtttacatgttcctggtgaaatggcaggacctgtcggagaaggtggtctaccggcgtttca

SEQ ID NO: 29402 - RNA, 79 nt, synthetic construct
  source 1..79: mol_type = other RNA
actctggctttcccccaggtgtacatgttcctggtgaaatggcaggacctgtcggagaaggtggtctaccggcgcttca

SEQ ID NO: 29403 - RNA, 79 nt, synthetic construct
  source 1..79: mol_type = other RNA
actctggctttcccccaggtctacatgttcctggtgaaatggcaggacctgtcggagaaggtggtctaccggaggttca

SEQ ID NO: 29404 - RNA, 79 nt, synthetic construct
  source 1..79: mol_type = other RNA
actctggctttcccccaggtctacatgttcctggtgaaatggcaggacctgtcggagaaggtggtctaccggcgattca

SEQ ID NO: 29405 - RNA, 79 nt, synthetic construct
  source 1..79: mol_type = other RNA
actctggctttcccccaggtctacatgttcctggtgaaatggcaggacctgtcggagaaggtggtctaccggcgcttca

SEQ ID NO: 29406 - RNA, 79 nt, synthetic construct
  source 1..79: mol_type = other RNA
actctggctttcccccaggtatacatgttcctggtgaaatggcaggacctgtcggagaaggtggtctaccggcgtttca

SEQ ID NO: 29407 - RNA, 79 nt, synthetic construct
  source 1..79: mol_type = other RNA
actctggctttcccccaggtctacatgttcctggtgaaatggcaggacctgtcggagaaggtggtctaccggcgtttca

SEQ ID NO: 29408 - RNA, 79 nt, synthetic construct
  source 1..79: mol_type = other RNA
actctggctttcccccaggtgtacatgttcctggtgaaatggcaggacctgtcggagaaggtggtctaccggcggttca

SEQ ID NO: 29409 - RNA, 79 nt, synthetic construct
  source 1..79: mol_type = other RNA
actctggctttcccccaggtgtacatgttcctggtgaaatggcaggacctgtcggagaaggtggtctaccggagattca

SEQ ID NO: 29410 - RNA, 79 nt, synthetic construct
  source 1..79: mol_type = other RNA
actctggctttcccccaggtttacatgttcctggtgaaatggcaggacctgtcggagaaggtggtctaccggaggttca

SEQ ID NO: 29411 - RNA, 79 nt, synthetic construct
  source 1..79: mol_type = other RNA
actctggctttcccccaggtttacatgttcctggtgaaatggcaggacctgtcggagaaggtggtctaccggagattca

SEQ ID NO: 29412 - RNA, 79 nt, synthetic construct
  source 1..79: mol_type = other RNA
actctggctttcccccaggtgtacatgttcctggtgaaatggcaggacctgtcggagaaggtggtctaccggaggttca

SEQ ID NO: 29413 - RNA, 80 nt, synthetic construct
  source 1..80: mol_type = other RNA
gactctggctttcccccaggtgtacatgttcctggtgaaatggcaggacctgtcggagaaggtggtctaccggcggttca

SEQ ID NO: 29414 - RNA, 80 nt, synthetic construct
  source 1..80: mol_type = other RNA
gactctggctttcccccaggtctacatgttcctggtgaaatggcaggacctgtcggagaaggtggtctaccggcgtttca

SEQ ID NO: 29415 - RNA, 80 nt, synthetic construct
  source 1..80: mol_type = other RNA
gactctggctttcccccaggtatacatgttcctggtgaaatggcaggacctgtcggagaaggtggtctaccggaggttca

SEQ ID NO: 29416 - RNA, 80 nt, synthetic construct
  source 1..80: mol_type = other RNA
gactctggctttcccccaggtatacatgttcctggtgaaatggcaggacctgtcggagaaggtggtctaccggcgattca

SEQ ID NO: 29417 - RNA, 80 nt, synthetic construct
  source 1..80: mol_type = other RNA
gactctggctttcccccaggtatacatgttcctggtgaaatggcaggacctgtcggagaaggtggtctaccggcgcttca

SEQ ID NO: 29418 - RNA, 80 nt, synthetic construct
  source 1..80: mol_type = other RNA
gactctggctttcccccaggtatacatgttcctggtgaaatggcaggacctgtcggagaaggtggtctaccggcggttca

SEQ ID NO: 29419 - RNA, 80 nt, synthetic construct
  source 1..80: mol_type = other RNA
gactctggctttcccccaggtatacatgttcctggtgaaatggcaggacctgtcggagaaggtggtctaccggcgtttca

SEQ ID NO: 29420 - RNA, 80 nt, synthetic construct
  source 1..80: mol_type = other RNA
gactctggctttcccccaggtctacatgttcctggtgaaatggcaggacctgtcggagaaggtggtctaccggagattca

SEQ ID NO: 29421 - RNA, 80 nt, synthetic construct
  source 1..80: mol_type = other RNA
gactctggctttcccccaggtctacatgttcctggtgaaatggcaggacctgtcggagaaggtggtctaccggaggttca

SEQ ID NO: 29422 - RNA, 80 nt, synthetic construct
  source 1..80: mol_type = other RNA
gactctggctttcccccaggtctacatgttcctggtgaaatggcaggacctgtcggagaaggtggtctaccggcgattca

SEQ ID NO: 29423 - RNA, 80 nt, synthetic construct
  source 1..80: mol_type = other RNA
gactctggctttcccccaggtctacatgttcctggtgaaatggcaggacctgtcggagaaggtggtctaccggcgcttca

SEQ ID NO: 29424 - RNA, 80 nt, synthetic construct
  source 1..80: mol_type = other RNA
gactctggctttcccccaggtctacatgttcctggtgaaatggcaggacctgtcggagaaggtggtctaccggcggttca

SEQ ID NO: 29425 - RNA, 80 nt, synthetic construct
  source 1..80: mol_type = other RNA
gactctggctttcccccaggtatacatgttcctggtgaaatggcaggacctgtcggagaaggtggtctaccggagattca

SEQ ID NO: 29426 - RNA, 80 nt, synthetic construct
  source 1..80: mol_type = other RNA
gactctggctttcccccaggtttacatgttcctggtgaaatggcaggacctgtcggagaaggtggtctaccggcgattca

SEQ ID NO: 29427 - RNA, 80 nt, synthetic construct
  source 1..80: mol_type = other RNA
gactctggctttcccccaggtgtacatgttcctggtgaaatggcaggacctgtcggagaaggtggtctaccggagattca

SEQ ID NO: 29428 - RNA, 80 nt, synthetic construct
  source 1..80: mol_type = other RNA
gactctggctttcccccaggtgtacatgttcctggtgaaatggcaggacctgtcggagaaggtggtctaccggcgattca

SEQ ID NO: 29429 - RNA, 80 nt, synthetic construct
  source 1..80: mol_type = other RNA
gactctggctttcccccaggtgtacatgttcctggtgaaatggcaggacctgtcggagaaggtggtctaccggcgcttca

SEQ ID NO: 29430 - RNA, 80 nt, synthetic construct
  source 1..80: mol_type = other RNA
gactctggctttcccccaggtgtacatgttcctggtgaaatggcaggacctgtcggagaaggtggtctaccggcgtttca

SEQ ID NO: 29431 - RNA, 80 nt, synthetic construct
  source 1..80: mol_type = other RNA
gactctggctttcccccaggtttacatgttcctggtgaaatggcaggacctgtcggagaaggtggtctaccggagattca

SEQ ID NO: 29432 - RNA, 80 nt, synthetic construct
  source 1..80: mol_type = other RNA
gactctggctttcccccaggtttacatgttcctggtgaaatggcaggacctgtcggagaaggtggtctaccggaggttca

SEQ ID NO: 29433 - RNA, 80 nt, synthetic construct
  source 1..80: mol_type = other RNA
gactctggctttcccccaggtttacatgttcctggtgaaatggcaggacctgtcggagaaggtggtctaccggcgtttca

SEQ ID NO: 29434 - RNA, 80 nt, synthetic construct
  source 1..80: mol_type = other RNA
gactctggctttcccccaggtttacatgttcctggtgaaatggcaggacctgtcggagaaggtggtctaccggcgcttca

SEQ ID NO: 29435 - RNA, 80 nt, synthetic construct
  source 1..80: mol_type = other RNA
gactctggctttcccccaggtttacatgttcctggtgaaatggcaggacctgtcggagaaggtggtctaccggcggttca

SEQ ID NO: 29436 - RNA, 80 nt, synthetic construct
  source 1..80: mol_type = other RNA
gactctggctttcccccaggtgtacatgttcctggtgaaatggcaggacctgtcggagaaggtggtctaccggaggttca

SEQ ID NO: 29437 - RNA, 81 nt, synthetic construct
  source 1..81: mol_type = other RNA
cgactctggctttcccccaggtctacatgttcctggtgaaatggcaggacctgtcggagaaggtggtctaccggagattca

SEQ ID NO: 29438 - RNA, 81 nt, synthetic construct
  source 1..81: mol_type = other RNA
cgactctggctttcccccaggtctacatgttcctggtgaaatggcaggacctgtcggagaaggtggtctaccggcgattca

SEQ ID NO: 29439 - RNA, 81 nt, synthetic construct
  source 1..81: mol_type = other RNA
cgactctggctttcccccaggtctacatgttcctggtgaaatggcaggacctgtcggagaaggtggtctaccggcgcttca

SEQ ID NO: 29440 - RNA, 81 nt, synthetic construct
  source 1..81: mol_type = other RNA
cgactctggctttcccccaggtctacatgttcctggtgaaatggcaggacctgtcggagaaggtggtctaccggcggttca

SEQ ID NO: 29441 - RNA, 81 nt, synthetic construct
  source 1..81: mol_type = other RNA
cgactctggctttcccccaggtgtacatgttcctggtgaaatggcaggacctgtcggagaaggtggtctaccggagattca

SEQ ID NO: 29442 - RNA, 81 nt, synthetic construct
  source 1..81: mol_type = other RNA
cgactctggctttcccccaggtctacatgttcctggtgaaatggcaggacctgtcggagaaggtggtctaccggcgtttca

SEQ ID NO: 29443 - RNA, 81 nt, synthetic construct
  source 1..81: mol_type = other RNA
cgactctggctttcccccaggtgtacatgttcctggtgaaatggcaggacctgtcggagaaggtggtctaccggaggttca

SEQ ID NO: 29444 - RNA, 81 nt, synthetic construct
  source 1..81: mol_type = other RNA
cgactctggctttcccccaggtttacatgttcctggtgaaatggcaggacctgtcggagaaggtggtctaccggagattca

SEQ ID NO: 29445 - RNA, 81 nt, synthetic construct
  source 1..81: mol_type = other RNA
cgactctggctttcccccaggtgtacatgttcctggtgaaatggcaggacctgtcggagaaggtggtctaccggcgattca

SEQ ID NO: 29446 - RNA, 81 nt, synthetic construct
  source 1..81: mol_type = other RNA
cgactctggctttcccccaggtttacatgttcctggtgaaatggcaggacctgtcggagaaggtggtctaccggcgcttca

SEQ ID NO: 29447 - RNA, 81 nt, synthetic construct
  source 1..81: mol_type = other RNA
cgactctggctttcccccaggtttacatgttcctggtgaaatggcaggacctgtcggagaaggtggtctaccggcgattca

SEQ ID NO: 29448 - RNA, 81 nt, synthetic construct
  source 1..81: mol_type = other RNA
cgactctggctttcccccaggtttacatgttcctggtgaaatggcaggacctgtcggagaaggtggtctaccggaggttca

SEQ ID NO: 29449 - RNA, 81 nt, synthetic construct
  source 1..81: mol_type = other RNA
cgactctggctttcccccaggtttacatgttcctggtgaaatggcaggacctgtcggagaaggtggtctaccggcggttca

SEQ ID NO: 29450 - RNA, 81 nt, synthetic construct
  source 1..81: mol_type = other RNA
cgactctggctttcccccaggtgtacatgttcctggtgaaatggcaggacctgtcggagaaggtggtctaccggcgtttca

SEQ ID NO: 29451 - RNA, 81 nt, synthetic construct
  source 1..81: mol_type = other RNA
cgactctggctttcccccaggtgtacatgttcctggtgaaatggcaggacctgtcggagaaggtggtctaccggcgcttca

SEQ ID NO: 29452 - RNA, 81 nt, synthetic construct
  source 1..81: mol_type = other RNA
cgactctggctttcccccaggtatacatgttcctggtgaaatggcaggacctgtcggagaaggtggtctaccggaggttca

SEQ ID NO: 29453 - RNA, 81 nt, synthetic construct
  source 1..81: mol_type = other RNA
cgactctggctttcccccaggtctacatgttcctggtgaaatggcaggacctgtcggagaaggtggtctaccggaggttca

SEQ ID NO: 29454 - RNA, 81 nt, synthetic construct
  source 1..81: mol_type = other RNA
cgactctggctttcccccaggtatacatgttcctggtgaaatggcaggacctgtcggagaaggtggtctaccggcgtttca

SEQ ID NO: 29455 - RNA, 81 nt, synthetic construct
  source 1..81: mol_type = other RNA
cgactctggctttcccccaggtatacatgttcctggtgaaatggcaggacctgtcggagaaggtggtctaccggcggttca

SEQ ID NO: 29456 - RNA, 81 nt, synthetic construct
  source 1..81: mol_type = other RNA
cgactctggctttcccccaggtatacatgttcctggtgaaatggcaggacctgtcggagaaggtggtctaccggcgattca

SEQ ID NO: 29457 - RNA, 81 nt, synthetic construct
  source 1..81: mol_type = other RNA
cgactctggctttcccccaggtatacatgttcctggtgaaatggcaggacctgtcggagaaggtggtctaccggcgcttca

SEQ ID NO: 29458 - RNA, 81 nt, synthetic construct
  source 1..81: mol_type = other RNA
cgactctggctttcccccaggtgtacatgttcctggtgaaatggcaggacctgtcggagaaggtggtctaccggcggttca

SEQ ID NO: 29459 - RNA, 81 nt, synthetic construct
  source 1..81: mol_type = other RNA
cgactctggctttcccccaggtatacatgttcctggtgaaatggcaggacctgtcggagaaggtggtctaccggagattca

SEQ ID NO: 29460 - RNA, 81 nt, synthetic construct
  source 1..81: mol_type = other RNA
cgactctggctttcccccaggtttacatgttcctggtgaaatggcaggacctgtcggagaaggtggtctaccggcgtttca

SEQ ID NO: 29461 - RNA, 82 nt, synthetic construct
  source 1..82: mol_type = other RNA
ccgactctggctttcccccaggtgtacatgttcctggtgaaatggcaggacctgtcggagaaggtggtctaccggcgtttca

SEQ ID NO: 29462 - RNA, 82 nt, synthetic construct
  source 1..82: mol_type = other RNA
ccgactctggctttcccccaggtttacatgttcctggtgaaatggcaggacctgtcggagaaggtggtctaccggagattca

SEQ ID NO: 29463 - RNA, 82 nt, synthetic construct
  source 1..82: mol_type = other RNA
ccgactctggctttcccccaggtttacatgttcctggtgaaatggcaggacctgtcggagaaggtggtctaccggaggttca

SEQ ID NO: 29464 - RNA, 82 nt, synthetic construct
  source 1..82: mol_type = other RNA
ccgactctggctttcccccaggtttacatgttcctggtgaaatggcaggacctgtcggagaaggtggtctaccggcgattca

SEQ ID NO: 29465 - RNA, 82 nt, synthetic construct
  source 1..82: mol_type = other RNA
ccgactctggctttcccccaggtttacatgttcctggtgaaatggcaggacctgtcggagaaggtggtctaccggcgcttca

SEQ ID NO: 29466 - RNA, 82 nt, synthetic construct
  source 1..82: mol_type = other RNA
ccgactctggctttcccccaggtctacatgttcctggtgaaatggcaggacctgtcggagaaggtggtctaccggcggttca

SEQ ID NO: 29467 - RNA, 82 nt, synthetic construct
  source 1..82: mol_type = other RNA
ccgactctggctttcccccaggtgtacatgttcctggtgaaatggcaggacctgtcggagaaggtggtctaccggcgattca

SEQ ID NO: 29468 - RNA, 82 nt, synthetic construct
  source 1..82: mol_type = other RNA
ccgactctggctttcccccaggtgtacatgttcctggtgaaatggcaggacctgtcggagaaggtggtctaccggcggttca

SEQ ID NO: 29469 - RNA, 82 nt, synthetic construct
  source 1..82: mol_type = other RNA
ccgactctggctttcccccaggtgtacatgttcctggtgaaatggcaggacctgtcggagaaggtggtctaccggcgcttca

SEQ ID NO: 29470 - RNA, 82 nt, synthetic construct
  source 1..82: mol_type = other RNA
ccgactctggctttcccccaggtctacatgttcctggtgaaatggcaggacctgtcggagaaggtggtctaccggcgtttca

SEQ ID NO: 29471 - RNA, 82 nt, synthetic construct
  source 1..82: mol_type = other RNA
ccgactctggctttcccccaggtgtacatgttcctggtgaaatggcaggacctgtcggagaaggtggtctaccggaggttca

SEQ ID NO: 29472 - RNA, 82 nt, synthetic construct
  source 1..82: mol_type = other RNA
ccgactctggctttcccccaggtttacatgttcctggtgaaatggcaggacctgtcggagaaggtggtctaccggcggttca

SEQ ID NO: 29473 - RNA, 82 nt, synthetic construct
  source 1..82: mol_type = other RNA
ccgactctggctttcccccaggtgtacatgttcctggtgaaatggcaggacctgtcggagaaggtggtctaccggagattca

SEQ ID NO: 29474 - RNA, 82 nt, synthetic construct
  source 1..82: mol_type = other RNA
ccgactctggctttcccccaggtatacatgttcctggtgaaatggcaggacctgtcggagaaggtggtctaccggagattca

SEQ ID NO: 29475 - RNA, 82 nt, synthetic construct
  source 1..82: mol_type = other RNA
ccgactctggctttcccccaggtatacatgttcctggtgaaatggcaggacctgtcggagaaggtggtctaccggaggttca

SEQ ID NO: 29476 - RNA, 82 nt, synthetic construct
  source 1..82: mol_type = other RNA
ccgactctggctttcccccaggtatacatgttcctggtgaaatggcaggacctgtcggagaaggtggtctaccggcgattca

SEQ ID NO: 29477 - RNA, 82 nt, synthetic construct
  source 1..82: mol_type = other RNA
ccgactctggctttcccccaggtatacatgttcctggtgaaatggcaggacctgtcggagaaggtggtctaccggcgcttca

SEQ ID NO: 29478 - RNA, 82 nt, synthetic construct
  source 1..82: mol_type = other RNA
ccgactctggctttcccccaggtatacatgttcctggtgaaatggcaggacctgtcggagaaggtggtctaccggcggttca

SEQ ID NO: 29479 - RNA, 82 nt, synthetic construct
  source 1..82: mol_type = other RNA
ccgactctggctttcccccaggtatacatgttcctggtgaaatggcaggacctgtcggagaaggtggtctaccggcgtttca

SEQ ID NO: 29480 - RNA, 82 nt, synthetic construct
  source 1..82: mol_type = other RNA
ccgactctggctttcccccaggtctacatgttcctggtgaaatggcaggacctgtcggagaaggtggtctaccggagattca

SEQ ID NO: 29481 - RNA, 82 nt, synthetic construct
  source 1..82: mol_type = other RNA
ccgactctggctttcccccaggtctacatgttcctggtgaaatggcaggacctgtcggagaaggtggtctaccggaggttca

SEQ ID NO: 29482 - RNA, 82 nt, synthetic construct
  source 1..82: mol_type = other RNA
ccgactctggctttcccccaggtctacatgttcctggtgaaatggcaggacctgtcggagaaggtggtctaccggcgattca

SEQ ID NO: 29483 - RNA, 82 nt, synthetic construct
  source 1..82: mol_type = other RNA
ccgactctggctttcccccaggtttacatgttcctggtgaaatggcaggacctgtcggagaaggtggtctaccggcgtttca

SEQ ID NO: 29484 - RNA, 82 nt, synthetic construct
  source 1..82: mol_type = other RNA
ccgactctggctttcccccaggtctacatgttcctggtgaaatggcaggacctgtcggagaaggtggtctaccggcgcttca

SEQ ID NO: 29485 - RNA, 83 nt, synthetic construct
  source 1..83: mol_type = other RNA
cccgactctggctttcccccaggtttacatgttcctggtgaaatggcaggacctgtcggagaaggtggtctaccggaggttca

SEQ ID NO: 29486 - RNA, 83 nt, synthetic construct
  source 1..83: mol_type = other RNA
cccgactctggctttcccccaggtatacatgttcctggtgaaatggcaggacctgtcggagaaggtggtctaccggcgtttca

SEQ ID NO: 29487 - RNA, 83 nt, synthetic construct
  source 1..83: mol_type = other RNA
cccgactctggctttcccccaggtctacatgttcctggtgaaatggcaggacctgtcggagaaggtggtctaccggaggttca

SEQ ID NO: 29488 - RNA, 83 nt, synthetic construct
  source 1..83: mol_type = other RNA
cccgactctggctttcccccaggtctacatgttcctggtgaaatggcaggacctgtcggagaaggtggtctaccggcggttca

SEQ ID NO: 29489 - RNA, 83 nt, synthetic construct
  source 1..83: mol_type = other RNA
cccgactctggctttcccccaggtctacatgttcctggtgaaatggcaggacctgtcggagaaggtggtctaccggcgcttca

SEQ ID NO: 29490 - RNA, 83 nt, synthetic construct
  source 1..83: mol_type = other RNA
cccgactctggctttcccccaggtctacatgttcctggtgaaatggcaggacctgtcggagaaggtggtctaccggcgattca

SEQ ID NO: 29491 - RNA, 83 nt, synthetic construct
  source 1..83: mol_type = other RNA
cccgactctggctttcccccaggtatacatgttcctggtgaaatggcaggacctgtcggagaaggtggtctaccggcgattca

SEQ ID NO: 29492 - RNA, 83 nt, synthetic construct
  source 1..83: mol_type = other RNA
cccgactctggctttcccccaggtctacatgttcctggtgaaatggcaggacctgtcggagaaggtggtctaccggagattca

SEQ ID NO: 29493 - RNA, 83 nt, synthetic construct
  source 1..83: mol_type = other RNA
cccgactctggctttcccccaggtatacatgttcctggtgaaatggcaggacctgtcggagaaggtggtctaccggcgcttca

SEQ ID NO: 29494 - RNA, 83 nt, synthetic construct
  source 1..83: mol_type = other RNA
cccgactctggctttcccccaggtctacatgttcctggtgaaatggcaggacctgtcggagaaggtggtctaccggcgtttca

SEQ ID NO: 29495 - RNA, 83 nt, synthetic construct
  source 1..83: mol_type = other RNA
cccgactctggctttcccccaggtgtacatgttcctggtgaaatggcaggacctgtcggagaaggtggtctaccggaggttca

SEQ ID NO: 29496 - RNA, 83 nt, synthetic construct
  source 1..83: mol_type = other RNA
cccgactctggctttcccccaggtgtacatgttcctggtgaaatggcaggacctgtcggagaaggtggtctaccggagattca

SEQ ID NO: 29497 - RNA, 83 nt, synthetic construct
  source 1..83: mol_type = other RNA
cccgactctggctttcccccaggtgtacatgttcctggtgaaatggcaggacctgtcggagaaggtggtctaccggcgcttca

SEQ ID NO: 29498 - RNA, 83 nt, synthetic construct
  source 1..83: mol_type = other RNA
cccgactctggctttcccccaggtgtacatgttcctggtgaaatggcaggacctgtcggagaaggtggtctaccggcggttca

SEQ ID NO: 29499 - RNA, 83 nt, synthetic construct
  source 1..83: mol_type = other RNA
cccgactctggctttcccccaggtgtacatgttcctggtgaaatggcaggacctgtcggagaaggtggtctaccggcgtttca

SEQ ID NO: 29500 - RNA, 83 nt, synthetic construct
  source 1..83: mol_type = other RNA
cccgactctggctttcccccaggtttacatgttcctggtgaaatggcaggacctgtcggagaaggtggtctaccggagattca

SEQ ID NO: 29501 - RNA, 83 nt, synthetic construct
  source 1..83: mol_type = other RNA
cccgactctggctttcccccaggtttacatgttcctggtgaaatggcaggacctgtcggagaaggtggtctaccggcgattca

SEQ ID NO: 29502 - RNA, 83 nt, synthetic construct
  source 1..83: mol_type = other RNA
cccgactctggctttcccccaggtttacatgttcctggtgaaatggcaggacctgtcggagaaggtggtctaccggcgcttca

SEQ ID NO: 29503 - RNA, 83 nt, synthetic construct
  source 1..83: mol_type = other RNA
cccgactctggctttcccccaggtttacatgttcctggtgaaatggcaggacctgtcggagaaggtggtctaccggcggttca

SEQ ID NO: 29504 - RNA, 83 nt, synthetic construct
  source 1..83: mol_type = other RNA
cccgactctggctttcccccaggtatacatgttcctggtgaaatggcaggacctgtcggagaaggtggtctaccggagattca

SEQ ID NO: 29505 - RNA, 83 nt, synthetic construct
  source 1..83: mol_type = other RNA
cccgactctggctttcccccaggtatacatgttcctggtgaaatggcaggacctgtcggagaaggtggtctaccggaggttca

SEQ ID NO: 29506 - RNA, 83 nt, synthetic construct
  source 1..83: mol_type = other RNA
cccgactctggctttcccccaggtttacatgttcctggtgaaatggcaggacctgtcggagaaggtggtctaccggcgtttca

SEQ ID NO: 29507 - RNA, 83 nt, synthetic construct
  source 1..83: mol_type = other RNA
cccgactctggctttcccccaggtatacatgttcctggtgaaatggcaggacctgtcggagaaggtggtctaccggcggttca

SEQ ID NO: 29508 - RNA, 83 nt, synthetic construct
  source 1..83: mol_type = other RNA
cccgactctggctttcccccaggtgtacatgttcctggtgaaatggcaggacctgtcggagaaggtggtctaccggcgattca

SEQ ID NO: 29509 - RNA, 84 nt, synthetic construct
  source 1..84: mol_type = other RNA
ccccgactctggctttcccccaggtctacatgttcctggtgaaatggcaggacctgtcggagaaggtggtctaccggagattca

SEQ ID NO: 29510 - RNA, 84 nt, synthetic construct
  source 1..84: mol_type = other RNA
ccccgactctggctttcccccaggtctacatgttcctggtgaaatggcaggacctgtcggagaaggtggtctaccggcgcttca

SEQ ID NO: 29511 - RNA, 84 nt, synthetic construct
  source 1..84: mol_type = other RNA
ccccgactctggctttcccccaggtatacatgttcctggtgaaatggcaggacctgtcggagaaggtggtctaccggaggttca

SEQ ID NO: 29512 - RNA, 84 nt, synthetic construct
  source 1..84: mol_type = other RNA
ccccgactctggctttcccccaggtctacatgttcctggtgaaatggcaggacctgtcggagaaggtggtctaccggaggttca

SEQ ID NO: 29513 - RNA, 84 nt, synthetic construct
  source 1..84: mol_type = other RNA
ccccgactctggctttcccccaggtatacatgttcctggtgaaatggcaggacctgtcggagaaggtggtctaccggcgtttca

SEQ ID NO: 29514 - RNA, 84 nt, synthetic construct
  source 1..84: mol_type = other RNA
ccccgactctggctttcccccaggtatacatgttcctggtgaaatggcaggacctgtcggagaaggtggtctaccggcgattca

SEQ ID NO: 29515 - RNA, 84 nt, synthetic construct
  source 1..84: mol_type = other RNA
ccccgactctggctttcccccaggtatacatgttcctggtgaaatggcaggacctgtcggagaaggtggtctaccggcgcttca

SEQ ID NO: 29516 - RNA, 84 nt, synthetic construct
  source 1..84: mol_type = other RNA
ccccgactctggctttcccccaggtatacatgttcctggtgaaatggcaggacctgtcggagaaggtggtctaccggagattca

SEQ ID NO: 29517 - RNA, 84 nt, synthetic construct
  source 1..84: mol_type = other RNA
ccccgactctggctttcccccaggtgtacatgttcctggtgaaatggcaggacctgtcggagaaggtggtctaccggagattca

SEQ ID NO: 29518 - RNA, 84 nt, synthetic construct
  source 1..84: mol_type = other RNA
ccccgactctggctttcccccaggtctacatgttcctggtgaaatggcaggacctgtcggagaaggtggtctaccggcggttca

SEQ ID NO: 29519 - RNA, 84 nt, synthetic construct
  source 1..84: mol_type = other RNA
ccccgactctggctttcccccaggtatacatgttcctggtgaaatggcaggacctgtcggagaaggtggtctaccggcggttca

SEQ ID NO: 29520 - RNA, 84 nt, synthetic construct
  source 1..84: mol_type = other RNA
ccccgactctggctttcccccaggtctacatgttcctggtgaaatggcaggacctgtcggagaaggtggtctaccggcgtttca

SEQ ID NO: 29521 - RNA, 84 nt, synthetic construct
  source 1..84: mol_type = other RNA
ccccgactctggctttcccccaggtttacatgttcctggtgaaatggcaggacctgtcggagaaggtggtctaccggagattca

SEQ ID NO: 29522 - RNA, 84 nt, synthetic construct
  source 1..84: mol_type = other RNA
ccccgactctggctttcccccaggtgtacatgttcctggtgaaatggcaggacctgtcggagaaggtggtctaccggaggttca

SEQ ID NO: 29523 - RNA, 84 nt, synthetic construct
  source 1..84: mol_type = other RNA
ccccgactctggctttcccccaggtctacatgttcctggtgaaatggcaggacctgtcggagaaggtggtctaccggcgattca

SEQ ID NO: 29524 - RNA, 84 nt, synthetic construct
  source 1..84: mol_type = other RNA
ccccgactctggctttcccccaggtttacatgttcctggtgaaatggcaggacctgtcggagaaggtggtctaccggcgtttca

SEQ ID NO: 29525 - RNA, 84 nt, synthetic construct
  source 1..84: mol_type = other RNA
ccccgactctggctttcccccaggtgtacatgttcctggtgaaatggcaggacctgtcggagaaggtggtctaccggcgattca

SEQ ID NO: 29526 - RNA, 84 nt, synthetic construct
  source 1..84: mol_type = other RNA
ccccgactctggctttcccccaggtttacatgttcctggtgaaatggcaggacctgtcggagaaggtggtctaccggcgcttca

SEQ ID NO: 29527 - RNA, 84 nt, synthetic construct
  source 1..84: mol_type = other RNA
ccccgactctggctttcccccaggtttacatgttcctggtgaaatggcaggacctgtcggagaaggtggtctaccggcgattca

SEQ ID NO: 29528 - RNA, 84 nt, synthetic construct
  source 1..84: mol_type = other RNA
ccccgactctggctttcccccaggtttacatgttcctggtgaaatggcaggacctgtcggagaaggtggtctaccggcggttca

SEQ ID NO: 29529 - RNA, 84 nt, synthetic construct
  source 1..84: mol_type = other RNA
ccccgactctggctttcccccaggtttacatgttcctggtgaaatggcaggacctgtcggagaaggtggtctaccggaggttca

SEQ ID NO: 29530 - RNA, 84 nt, synthetic construct
  source 1..84: mol_type = other RNA
ccccgactctggctttcccccaggtgtacatgttcctggtgaaatggcaggacctgtcggagaaggtggtctaccggcgcttca

SEQ ID NO: 29531 - RNA, 84 nt, synthetic construct
  source 1..84: mol_type = other RNA
ccccgactctggctttcccccaggtgtacatgttcctggtgaaatggcaggacctgtcggagaaggtggtctaccggcggttca

SEQ ID NO: 29532 - RNA, 84 nt, synthetic construct
  source 1..84: mol_type = other RNA
ccccgactctggctttcccccaggtgtacatgttcctggtgaaatggcaggacctgtcggagaaggtggtctaccggcgtttca

SEQ ID NO: 29533 - RNA, 85 nt, synthetic construct
  source 1..85: mol_type = other RNA
cccccgactctggctttcccccaggtctacatgttcctggtgaaatggcaggacctgtcggagaaggtggtctaccggcgcttca

SEQ ID NO: 29534 - RNA, 85 nt, synthetic construct
  source 1..85: mol_type = other RNA
cccccgactctggctttcccccaggtctacatgttcctggtgaaatggcaggacctgtcggagaaggtggtctaccggcgtttca

SEQ ID NO: 29535 - RNA, 85 nt, synthetic construct
  source 1..85: mol_type = other RNA
cccccgactctggctttcccccaggtttacatgttcctggtgaaatggcaggacctgtcggagaaggtggtctaccggagattca

SEQ ID NO: 29536 - RNA, 85 nt, synthetic construct
  source 1..85: mol_type = other RNA
cccccgactctggctttcccccaggtgtacatgttcctggtgaaatggcaggacctgtcggagaaggtggtctaccggcgtttca

SEQ ID NO: 29537 - RNA, 85 nt, synthetic construct
  source 1..85: mol_type = other RNA
cccccgactctggctttcccccaggtgtacatgttcctggtgaaatggcaggacctgtcggagaaggtggtctaccggcggttca

SEQ ID NO: 29538 - RNA, 85 nt, synthetic construct
  source 1..85: mol_type = other RNA
cccccgactctggctttcccccaggtgtacatgttcctggtgaaatggcaggacctgtcggagaaggtggtctaccggagattca

SEQ ID NO: 29539 - RNA, 85 nt, synthetic construct
  source 1..85: mol_type = other RNA
cccccgactctggctttcccccaggtgtacatgttcctggtgaaatggcaggacctgtcggagaaggtggtctaccggcgcttca

SEQ ID NO: 29540 - RNA, 85 nt, synthetic construct
  source 1..85: mol_type = other RNA
cccccgactctggctttcccccaggtgtacatgttcctggtgaaatggcaggacctgtcggagaaggtggtctaccggcgattca

SEQ ID NO: 29541 - RNA, 85 nt, synthetic construct
  source 1..85: mol_type = other RNA
cccccgactctggctttcccccaggtgtacatgttcctggtgaaatggcaggacctgtcggagaaggtggtctaccggaggttca

SEQ ID NO: 29542 - RNA, 85 nt, synthetic construct
  source 1..85: mol_type = other RNA
cccccgactctggctttcccccaggtttacatgttcctggtgaaatggcaggacctgtcggagaaggtggtctaccggcgtttca

SEQ ID NO: 29543 - RNA, 85 nt, synthetic construct
  source 1..85: mol_type = other RNA
cccccgactctggctttcccccaggtctacatgttcctggtgaaatggcaggacctgtcggagaaggtggtctaccggaggttca

SEQ ID NO: 29544 - RNA, 85 nt, synthetic construct
  source 1..85: mol_type = other RNA
cccccgactctggctttcccccaggtttacatgttcctggtgaaatggcaggacctgtcggagaaggtggtctaccggaggttca

SEQ ID NO: 29545 - RNA, 85 nt, synthetic construct
  source 1..85: mol_type = other RNA
cccccgactctggctttcccccaggtctacatgttcctggtgaaatggcaggacctgtcggagaaggtggtctaccggagattca

SEQ ID NO: 29546 - RNA, 85 nt, synthetic construct
  source 1..85: mol_type = other RNA
cccccgactctggctttcccccaggtctacatgttcctggtgaaatggcaggacctgtcggagaaggtggtctaccggcgattca

SEQ ID NO: 29547 - RNA, 85 nt, synthetic construct
  source 1..85: mol_type = other RNA
cccccgactctggctttcccccaggtttacatgttcctggtgaaatggcaggacctgtcggagaaggtggtctaccggcggttca

SEQ ID NO: 29548 - RNA, 85 nt, synthetic construct
  source 1..85: mol_type = other RNA
cccccgactctggctttcccccaggtttacatgttcctggtgaaatggcaggacctgtcggagaaggtggtctaccggcgcttca

SEQ ID NO: 29549 - RNA, 85 nt, synthetic construct
  source 1..85: mol_type = other RNA
cccccgactctggctttcccccaggtttacatgttcctggtgaaatggcaggacctgtcggagaaggtggtctaccggcgattca

SEQ ID NO: 29550 - RNA, 85 nt, synthetic construct
  source 1..85: mol_type = other RNA
cccccgactctggctttcccccaggtctacatgttcctggtgaaatggcaggacctgtcggagaaggtggtctaccggcggttca

SEQ ID NO: 29551 - RNA, 85 nt, synthetic construct
  source 1..85: mol_type = other RNA
cccccgactctggctttcccccaggtatacatgttcctggtgaaatggcaggacctgtcggagaaggtggtctaccggagattca

SEQ ID NO: 29552 - RNA, 85 nt, synthetic construct
  source 1..85: mol_type = other RNA
cccccgactctggctttcccccaggtatacatgttcctggtgaaatggcaggacctgtcggagaaggtggtctaccggcgattca

SEQ ID NO: 29553 - RNA, 85 nt, synthetic construct
  source 1..85: mol_type = other RNA
cccccgactctggctttcccccaggtatacatgttcctggtgaaatggcaggacctgtcggagaaggtggtctaccggcgcttca

SEQ ID NO: 29554 - RNA, 85 nt, synthetic construct
  source 1..85: mol_type = other RNA
cccccgactctggctttcccccaggtatacatgttcctggtgaaatggcaggacctgtcggagaaggtggtctaccggaggttca

SEQ ID NO: 29555 - RNA, 85 nt, synthetic construct
  source 1..85: mol_type = other RNA
cccccgactctggctttcccccaggtatacatgttcctggtgaaatggcaggacctgtcggagaaggtggtctaccggcgtttca

SEQ ID NO: 29556 - RNA, 85 nt, synthetic construct
  source 1..85: mol_type = other RNA
cccccgactctggctttcccccaggtatacatgttcctggtgaaatggcaggacctgtcggagaaggtggtctaccggcggttca

SEQ ID NO: 29557 - RNA, 86 nt, synthetic construct
  source 1..86: mol_type = other RNA
tcccccgactctggctttcccccaggtatacatgttcctggtgaaatggcaggacctgtcggagaaggtggtctaccggagattca

SEQ ID NO: 29558 - RNA, 86 nt, synthetic construct
  source 1..86: mol_type = other RNA
tcccccgactctggctttcccccaggtatacatgttcctggtgaaatggcaggacctgtcggagaaggtggtctaccggaggttca

SEQ ID NO: 29559 - RNA, 86 nt, synthetic construct
  source 1..86: mol_type = other RNA
tcccccgactctggctttcccccaggtatacatgttcctggtgaaatggcaggacctgtcggagaaggtggtctaccggcgattca

SEQ ID NO: 29560 - RNA, 86 nt, synthetic construct
  source 1..86: mol_type = other RNA
tcccccgactctggctttcccccaggtatacatgttcctggtgaaatggcaggacctgtcggagaaggtggtctaccggcgcttca

SEQ ID NO: 29561 - RNA, 86 nt, synthetic construct
  source 1..86: mol_type = other RNA
tcccccgactctggctttcccccaggtatacatgttcctggtgaaatggcaggacctgtcggagaaggtggtctaccggcggttca

SEQ ID NO: 29562 - RNA, 86 nt, synthetic construct
  source 1..86: mol_type = other RNA
tcccccgactctggctttcccccaggtatacatgttcctggtgaaatggcaggacctgtcggagaaggtggtctaccggcgtttca

SEQ ID NO: 29563 - RNA, 86 nt, synthetic construct
  source 1..86: mol_type = other RNA
tcccccgactctggctttcccccaggtctacatgttcctggtgaaatggcaggacctgtcggagaaggtggtctaccggagattca

SEQ ID NO: 29564 - RNA, 86 nt, synthetic construct
  source 1..86: mol_type = other RNA
tcccccgactctggctttcccccaggtctacatgttcctggtgaaatggcaggacctgtcggagaaggtggtctaccggaggttca

SEQ ID NO: 29565 - RNA, 86 nt, synthetic construct
  source 1..86: mol_type = other RNA
tcccccgactctggctttcccccaggtctacatgttcctggtgaaatggcaggacctgtcggagaaggtggtctaccggcgattca

SEQ ID NO: 29566 - RNA, 86 nt, synthetic construct
  source 1..86: mol_type = other RNA
tcccccgactctggctttcccccaggtgtacatgttcctggtgaaatggcaggacctgtcggagaaggtggtctaccggcggttca

SEQ ID NO: 29567 - RNA, 86 nt, synthetic construct
  source 1..86: mol_type = other RNA
tcccccgactctggctttcccccaggtctacatgttcctggtgaaatggcaggacctgtcggagaaggtggtctaccggcgtttca

SEQ ID NO: 29568 - RNA, 86 nt, synthetic construct
  source 1..86: mol_type = other RNA
tcccccgactctggctttcccccaggtgtacatgttcctggtgaaatggcaggacctgtcggagaaggtggtctaccggaggttca

SEQ ID NO: 29569 - RNA, 86 nt, synthetic construct
  source 1..86: mol_type = other RNA
tcccccgactctggctttcccccaggtgtacatgttcctggtgaaatggcaggacctgtcggagaaggtggtctaccggcgattca

SEQ ID NO: 29570 - RNA, 86 nt, synthetic construct
  source 1..86: mol_type = other RNA
tcccccgactctggctttcccccaggtgtacatgttcctggtgaaatggcaggacctgtcggagaaggtggtctaccggcgtttca

SEQ ID NO: 29571 - RNA, 86 nt, synthetic construct
  source 1..86: mol_type = other RNA
tcccccgactctggctttcccccaggtttacatgttcctggtgaaatggcaggacctgtcggagaaggtggtctaccggagattca

SEQ ID NO: 29572 - RNA, 86 nt, synthetic construct
  source 1..86: mol_type = other RNA
tcccccgactctggctttcccccaggtttacatgttcctggtgaaatggcaggacctgtcggagaaggtggtctaccggaggttca

SEQ ID NO: 29573 - RNA, 86 nt, synthetic construct
  source 1..86: mol_type = other RNA
tcccccgactctggctttcccccaggtttacatgttcctggtgaaatggcaggacctgtcggagaaggtggtctaccggcgattca

SEQ ID NO: 29574 - RNA, 86 nt, synthetic construct
  source 1..86: mol_type = other RNA
tcccccgactctggctttcccccaggtttacatgttcctggtgaaatggcaggacctgtcggagaaggtggtctaccggcgcttca

SEQ ID NO: 29575 - RNA, 86 nt, synthetic construct
  source 1..86: mol_type = other RNA
tcccccgactctggctttcccccaggtttacatgttcctggtgaaatggcaggacctgtcggagaaggtggtctaccggcgtttca

SEQ ID NO: 29576 - RNA, 86 nt, synthetic construct
  source 1..86: mol_type = other RNA
tcccccgactctggctttcccccaggtttacatgttcctggtgaaatggcaggacctgtcggagaaggtggtctaccggcggttca

SEQ ID NO: 29577 - RNA, 86 nt, synthetic construct
  source 1..86: mol_type = other RNA
tcccccgactctggctttcccccaggtgtacatgttcctggtgaaatggcaggacctgtcggagaaggtggtctaccggagattca

SEQ ID NO: 29578 - RNA, 86 nt, synthetic construct
  source 1..86: mol_type = other RNA
tcccccgactctggctttcccccaggtgtacatgttcctggtgaaatggcaggacctgtcggagaaggtggtctaccggcgcttca

SEQ ID NO: 29579 - RNA, 86 nt, synthetic construct
  source 1..86: mol_type = other RNA
tcccccgactctggctttcccccaggtctacatgttcctggtgaaatggcaggacctgtcggagaaggtggtctaccggcgcttca

SEQ ID NO: 29580 - RNA, 86 nt, synthetic construct
  source 1..86: mol_type = other RNA
tcccccgactctggctttcccccaggtctacatgttcctggtgaaatggcaggacctgtcggagaaggtggtctaccggcggttca

SEQ ID NO: 29581 - RNA, 87 nt, synthetic construct
  source 1..87: mol_type = other RNA
gtcccccgactctggctttcccccaggtgtacatgttcctggtgaaatggcaggacctgtcggagaaggtggtctaccggaggttca

SEQ ID NO: 29582 - RNA, 87 nt, synthetic construct
  source 1..87: mol_type = other RNA
gtcccccgactctggctttcccccaggtctacatgttcctggtgaaatggcaggacctgtcggagaaggtggtctaccggcggttca

SEQ ID NO: 29583 - RNA, 87 nt, synthetic construct
  source 1..87: mol_type = other RNA
gtcccccgactctggctttcccccaggtctacatgttcctggtgaaatggcaggacctgtcggagaaggtggtctaccggcgattca

SEQ ID NO: 29584 - RNA, 87 nt, synthetic construct
  source 1..87: mol_type = other RNA
gtcccccgactctggctttcccccaggtctacatgttcctggtgaaatggcaggacctgtcggagaaggtggtctaccggaggttca

SEQ ID NO: 29585 - RNA, 87 nt, synthetic construct
  source 1..87: mol_type = other RNA
gtcccccgactctggctttcccccaggtctacatgttcctggtgaaatggcaggacctgtcggagaaggtggtctaccggagattca

SEQ ID NO: 29586 - RNA, 87 nt, synthetic construct
  source 1..87: mol_type = other RNA
gtcccccgactctggctttcccccaggtatacatgttcctggtgaaatggcaggacctgtcggagaaggtggtctaccggcgtttca

SEQ ID NO: 29587 - RNA, 87 nt, synthetic construct
  source 1..87: mol_type = other RNA
gtcccccgactctggctttcccccaggtatacatgttcctggtgaaatggcaggacctgtcggagaaggtggtctaccggcggttca

SEQ ID NO: 29588 - RNA, 87 nt, synthetic construct
  source 1..87: mol_type = other RNA
gtcccccgactctggctttcccccaggtgtacatgttcctggtgaaatggcaggacctgtcggagaaggtggtctaccggcgtttca

SEQ ID NO: 29589 - RNA, 87 nt, synthetic construct
  source 1..87: mol_type = other RNA
gtcccccgactctggctttcccccaggtatacatgttcctggtgaaatggcaggacctgtcggagaaggtggtctaccggcgcttca

SEQ ID NO: 29590 - RNA, 87 nt, synthetic construct
  source 1..87: mol_type = other RNA
gtcccccgactctggctttcccccaggtatacatgttcctggtgaaatggcaggacctgtcggagaaggtggtctaccggaggttca

SEQ ID NO: 29591 - RNA, 87 nt, synthetic construct
  source 1..87: mol_type = other RNA
gtcccccgactctggctttcccccaggtatacatgttcctggtgaaatggcaggacctgtcggagaaggtggtctaccggagattca

SEQ ID NO: 29592 - RNA, 87 nt, synthetic construct
  source 1..87: mol_type = other RNA
gtcccccgactctggctttcccccaggtttacatgttcctggtgaaatggcaggacctgtcggagaaggtggtctaccggcggttca

SEQ ID NO: 29593 - RNA, 87 nt, synthetic construct
  source 1..87: mol_type = other RNA
gtcccccgactctggctttcccccaggtctacatgttcctggtgaaatggcaggacctgtcggagaaggtggtctaccggcgcttca

SEQ ID NO: 29594 - RNA, 87 nt, synthetic construct
  source 1..87: mol_type = other RNA
gtcccccgactctggctttcccccaggtttacatgttcctggtgaaatggcaggacctgtcggagaaggtggtctaccggcgtttca

SEQ ID NO: 29595 - RNA, 87 nt, synthetic construct
  source 1..87: mol_type = other RNA
gtcccccgactctggctttcccccaggtgtacatgttcctggtgaaatggcaggacctgtcggagaaggtggtctaccggagattca

SEQ ID NO: 29596 - RNA, 87 nt, synthetic construct
  source 1..87: mol_type = other RNA
gtcccccgactctggctttcccccaggtatacatgttcctggtgaaatggcaggacctgtcggagaaggtggtctaccggcgattca

SEQ ID NO: 29597 - RNA, 87 nt, synthetic construct
  source 1..87: mol_type = other RNA
gtcccccgactctggctttcccccaggtctacatgttcctggtgaaatggcaggacctgtcggagaaggtggtctaccggcgtttca

SEQ ID NO: 29598 - RNA, 87 nt, synthetic construct
  source 1..87: mol_type = other RNA
gtcccccgactctggctttcccccaggtttacatgttcctggtgaaatggcaggacctgtcggagaaggtggtctaccggaggttca

SEQ ID NO: 29599 - RNA, 87 nt, synthetic construct
  source 1..87: mol_type = other RNA
gtcccccgactctggctttcccccaggtttacatgttcctggtgaaatggcaggacctgtcggagaaggtggtctaccggcgattca

SEQ ID NO: 29600 - RNA, 87 nt, synthetic construct
  source 1..87: mol_type = other RNA
gtcccccgactctggctttcccccaggtgtacatgttcctggtgaaatggcaggacctgtcggagaaggtggtctaccggcgattca

SEQ ID NO: 29601 - RNA, 87 nt, synthetic construct
  source 1..87: mol_type = other RNA
gtcccccgactctggctttcccccaggtgtacatgttcctggtgaaatggcaggacctgtcggagaaggtggtctaccggcgcttca

SEQ ID NO: 29602 - RNA, 87 nt, synthetic construct
  source 1..87: mol_type = other RNA
gtcccccgactctggctttcccccaggtgtacatgttcctggtgaaatggcaggacctgtcggagaaggtggtctaccggcggttca

SEQ ID NO: 29603 - RNA, 87 nt, synthetic construct
  source 1..87: mol_type = other RNA
gtcccccgactctggctttcccccaggtttacatgttcctggtgaaatggcaggacctgtcggagaaggtggtctaccggcgcttca

SEQ ID NO: 29604 - RNA, 87 nt, synthetic construct
  source 1..87: mol_type = other RNA
gtcccccgactctggctttcccccaggtttacatgttcctggtgaaatggcaggacctgtcggagaaggtggtctaccggagattca

SEQ ID NO: 29605 - RNA, 88 nt, synthetic construct
  source 1..88: mol_type = other RNA
ggtcccccgactctggctttcccccaggtgtacatgttcctggtgaaatggcaggacctgtcggagaaggtggtctaccggcgcttca

SEQ ID NO: 29606 - RNA, 88 nt, synthetic construct
  source 1..88: mol_type = other RNA
ggtcccccgactctggctttcccccaggtgtacatgttcctggtgaaatggcaggacctgtcggagaaggtggtctaccggcgattca

SEQ ID NO: 29607 - RNA, 88 nt, synthetic construct
  source 1..88: mol_type = other RNA
ggtcccccgactctggctttcccccaggtctacatgttcctggtgaaatggcaggacctgtcggagaaggtggtctaccggaggttca

SEQ ID NO: 29608 - RNA, 88 nt, synthetic construct
  source 1..88: mol_type = other RNA
ggtcccccgactctggctttcccccaggtttacatgttcctggtgaaatggcaggacctgtcggagaaggtggtctaccggagattca

SEQ ID NO: 29609 - RNA, 88 nt, synthetic construct
  source 1..88: mol_type = other RNA
ggtcccccgactctggctttcccccaggtttacatgttcctggtgaaatggcaggacctgtcggagaaggtggtctaccggaggttca

SEQ ID NO: 29610 - RNA, 88 nt, synthetic construct
  source 1..88: mol_type = other RNA
ggtcccccgactctggctttcccccaggtgtacatgttcctggtgaaatggcaggacctgtcggagaaggtggtctaccggaggttca

SEQ ID NO: 29611 - RNA, 88 nt, synthetic construct
  source 1..88: mol_type = other RNA
ggtcccccgactctggctttcccccaggtgtacatgttcctggtgaaatggcaggacctgtcggagaaggtggtctaccggagattca

SEQ ID NO: 29612 - RNA, 88 nt, synthetic construct
  source 1..88: mol_type = other RNA
ggtcccccgactctggctttcccccaggtgtacatgttcctggtgaaatggcaggacctgtcggagaaggtggtctaccggcgtttca

SEQ ID NO: 29613 - RNA, 88 nt, synthetic construct
  source 1..88: mol_type = other RNA
ggtcccccgactctggctttcccccaggtctacatgttcctggtgaaatggcaggacctgtcggagaaggtggtctaccggcggttca

SEQ ID NO: 29614 - RNA, 88 nt, synthetic construct
  source 1..88: mol_type = other RNA
ggtcccccgactctggctttcccccaggtctacatgttcctggtgaaatggcaggacctgtcggagaaggtggtctaccggcgtttca

SEQ ID NO: 29615 - RNA, 88 nt, synthetic construct
  source 1..88: mol_type = other RNA
ggtcccccgactctggctttcccccaggtatacatgttcctggtgaaatggcaggacctgtcggagaaggtggtctaccggcgcttca

SEQ ID NO: 29616 - RNA, 88 nt, synthetic construct
  source 1..88: mol_type = other RNA
ggtcccccgactctggctttcccccaggtttacatgttcctggtgaaatggcaggacctgtcggagaaggtggtctaccggcgattca

SEQ ID NO: 29617 - RNA, 88 nt, synthetic construct
  source 1..88: mol_type = other RNA
ggtcccccgactctggctttcccccaggtatacatgttcctggtgaaatggcaggacctgtcggagaaggtggtctaccggcggttca

SEQ ID NO: 29618 - RNA, 88 nt, synthetic construct
  source 1..88: mol_type = other RNA
ggtcccccgactctggctttcccccaggtatacatgttcctggtgaaatggcaggacctgtcggagaaggtggtctaccggcgtttca

SEQ ID NO: 29619 - RNA, 88 nt, synthetic construct
  source 1..88: mol_type = other RNA
ggtcccccgactctggctttcccccaggtatacatgttcctggtgaaatggcaggacctgtcggagaaggtggtctaccggcgattca

SEQ ID NO: 29620 - RNA, 88 nt, synthetic construct
  source 1..88: mol_type = other RNA
ggtcccccgactctggctttcccccaggtctacatgttcctggtgaaatggcaggacctgtcggagaaggtggtctaccggagattca

SEQ ID NO: 29621 - RNA, 88 nt, synthetic construct
  source 1..88: mol_type = other RNA
ggtcccccgactctggctttcccccaggtctacatgttcctggtgaaatggcaggacctgtcggagaaggtggtctaccggcgattca

SEQ ID NO: 29622 - RNA, 88 nt, synthetic construct
  source 1..88: mol_type = other RNA
ggtcccccgactctggctttcccccaggtctacatgttcctggtgaaatggcaggacctgtcggagaaggtggtctaccggcgcttca

SEQ ID NO: 29623 - RNA, 88 nt, synthetic construct
  source 1..88: mol_type = other RNA
ggtcccccgactctggctttcccccaggtgtacatgttcctggtgaaatggcaggacctgtcggagaaggtggtctaccggcggttca

SEQ ID NO: 29624 - RNA, 88 nt, synthetic construct
  source 1..88: mol_type = other RNA
ggtcccccgactctggctttcccccaggtatacatgttcctggtgaaatggcaggacctgtcggagaaggtggtctaccggaggttca

SEQ ID NO: 29625 - RNA, 88 nt, synthetic construct
  source 1..88: mol_type = other RNA
ggtcccccgactctggctttcccccaggtatacatgttcctggtgaaatggcaggacctgtcggagaaggtggtctaccggagattca

SEQ ID NO: 29626 - RNA, 88 nt, synthetic construct
  source 1..88: mol_type = other RNA
ggtcccccgactctggctttcccccaggtttacatgttcctggtgaaatggcaggacctgtcggagaaggtggtctaccggcggttca

SEQ ID NO: 29627 - RNA, 88 nt, synthetic construct
  source 1..88: mol_type = other RNA
ggtcccccgactctggctttcccccaggtttacatgttcctggtgaaatggcaggacctgtcggagaaggtggtctaccggcgcttca

SEQ ID NO: 29628 - RNA, 88 nt, synthetic construct
  source 1..88: mol_type = other RNA
ggtcccccgactctggctttcccccaggtttacatgttcctggtgaaatggcaggacctgtcggagaaggtggtctaccggcgtttca

SEQ ID NO: 29629 - RNA, 89 nt, synthetic construct
  source 1..89: mol_type = other RNA
gggtcccccgactctggctttcccccaggtatacatgttcctggtgaaatggcaggacctgtcggagaaggtggtctaccggcgtttca

SEQ ID NO: 29630 - RNA, 89 nt, synthetic construct
  source 1..89: mol_type = other RNA
gggtcccccgactctggctttcccccaggtatacatgttcctggtgaaatggcaggacctgtcggagaaggtggtctaccggcggttca

SEQ ID NO: 29631 - RNA, 89 nt, synthetic construct
  source 1..89: mol_type = other RNA
gggtcccccgactctggctttcccccaggtttacatgttcctggtgaaatggcaggacctgtcggagaaggtggtctaccggcgattca

SEQ ID NO: 29632 - RNA, 89 nt, synthetic construct
  source 1..89: mol_type = other RNA
gggtcccccgactctggctttcccccaggtgtacatgttcctggtgaaatggcaggacctgtcggagaaggtggtctaccggagattca

SEQ ID NO: 29633 - RNA, 89 nt, synthetic construct
  source 1..89: mol_type = other RNA
gggtcccccgactctggctttcccccaggtctacatgttcctggtgaaatggcaggacctgtcggagaaggtggtctaccggagattca

SEQ ID NO: 29634 - RNA, 89 nt, synthetic construct
  source 1..89: mol_type = other RNA
gggtcccccgactctggctttcccccaggtttacatgttcctggtgaaatggcaggacctgtcggagaaggtggtctaccggcgcttca

SEQ ID NO: 29635 - RNA, 89 nt, synthetic construct
  source 1..89: mol_type = other RNA
gggtcccccgactctggctttcccccaggtttacatgttcctggtgaaatggcaggacctgtcggagaaggtggtctaccggaggttca

SEQ ID NO: 29636 - RNA, 89 nt, synthetic construct
  source 1..89: mol_type = other RNA
gggtcccccgactctggctttcccccaggtttacatgttcctggtgaaatggcaggacctgtcggagaaggtggtctaccggagattca

SEQ ID NO: 29637 - RNA, 89 nt, synthetic construct
  source 1..89: mol_type = other RNA
gggtcccccgactctggctttcccccaggtgtacatgttcctggtgaaatggcaggacctgtcggagaaggtggtctaccggcgtttca

SEQ ID NO: 29638 - RNA, 89 nt, synthetic construct
  source 1..89: mol_type = other RNA
gggtcccccgactctggctttcccccaggtgtacatgttcctggtgaaatggcaggacctgtcggagaaggtggtctaccggcggttca

SEQ ID NO: 29639 - RNA, 89 nt, synthetic construct
  source 1..89: mol_type = other RNA
gggtcccccgactctggctttcccccaggtgtacatgttcctggtgaaatggcaggacctgtcggagaaggtggtctaccggcgcttca

SEQ ID NO: 29640 - RNA, 89 nt, synthetic construct
  source 1..89: mol_type = other RNA
gggtcccccgactctggctttcccccaggtttacatgttcctggtgaaatggcaggacctgtcggagaaggtggtctaccggcggttca

SEQ ID NO: 29641 - RNA, 89 nt, synthetic construct
  source 1..89: mol_type = other RNA
gggtcccccgactctggctttcccccaggtctacatgttcctggtgaaatggcaggacctgtcggagaaggtggtctaccggaggttca

SEQ ID NO: 29642 - RNA, 89 nt, synthetic construct
  source 1..89: mol_type = other RNA
gggtcccccgactctggctttcccccaggtgtacatgttcctggtgaaatggcaggacctgtcggagaaggtggtctaccggcgattca

SEQ ID NO: 29643 - RNA, 89 nt, synthetic construct
  source 1..89: mol_type = other RNA
gggtcccccgactctggctttcccccaggtttacatgttcctggtgaaatggcaggacctgtcggagaaggtggtctaccggcgtttca

SEQ ID NO: 29644 - RNA, 89 nt, synthetic construct
  source 1..89: mol_type = other RNA
gggtcccccgactctggctttcccccaggtctacatgttcctggtgaaatggcaggacctgtcggagaaggtggtctaccggcgattca

SEQ ID NO: 29645 - RNA, 89 nt, synthetic construct
  source 1..89: mol_type = other RNA
gggtcccccgactctggctttcccccaggtatacatgttcctggtgaaatggcaggacctgtcggagaaggtggtctaccggcgcttca

SEQ ID NO: 29646 - RNA, 89 nt, synthetic construct
  source 1..89: mol_type = other RNA
gggtcccccgactctggctttcccccaggtatacatgttcctggtgaaatggcaggacctgtcggagaaggtggtctaccggcgattca

SEQ ID NO: 29647 - RNA, 89 nt, synthetic construct
  source 1..89: mol_type = other RNA
gggtcccccgactctggctttcccccaggtatacatgttcctggtgaaatggcaggacctgtcggagaaggtggtctaccggagattca

SEQ ID NO: 29648 - RNA, 89 nt, synthetic construct
  source 1..89: mol_type = other RNA
gggtcccccgactctggctttcccccaggtgtacatgttcctggtgaaatggcaggacctgtcggagaaggtggtctaccggaggttca

SEQ ID NO: 29649 - RNA, 89 nt, synthetic construct
  source 1..89: mol_type = other RNA
gggtcccccgactctggctttcccccaggtctacatgttcctggtgaaatggcaggacctgtcggagaaggtggtctaccggcgcttca

SEQ ID NO: 29650 - RNA, 89 nt, synthetic construct
  source 1..89: mol_type = other RNA
gggtcccccgactctggctttcccccaggtctacatgttcctggtgaaatggcaggacctgtcggagaaggtggtctaccggcggttca

SEQ ID NO: 29651 - RNA, 89 nt, synthetic construct
  source 1..89: mol_type = other RNA
gggtcccccgactctggctttcccccaggtctacatgttcctggtgaaatggcaggacctgtcggagaaggtggtctaccggcgtttca

SEQ ID NO: 29652 - RNA, 89 nt, synthetic construct
  source 1..89: mol_type = other RNA
gggtcccccgactctggctttcccccaggtatacatgttcctggtgaaatggcaggacctgtcggagaaggtggtctaccggaggttca

SEQ ID NO: 29653 - RNA, 90 nt, synthetic construct
  source 1..90: mol_type = other RNA
ggggtcccccgactctggctttcccccaggtctacatgttcctggtgaaatggcaggacctgtcggagaaggtggtctaccggcgcttca

SEQ ID NO: 29654 - RNA, 90 nt, synthetic construct
  source 1..90: mol_type = other RNA
ggggtcccccgactctggctttcccccaggtatacatgttcctggtgaaatggcaggacctgtcggagaaggtggtctaccggaggttca

SEQ ID NO: 29655 - RNA, 90 nt, synthetic construct
  source 1..90: mol_type = other RNA
ggggtcccccgactctggctttcccccaggtctacatgttcctggtgaaatggcaggacctgtcggagaaggtggtctaccggcgattca

SEQ ID NO: 29656 - RNA, 90 nt, synthetic construct
  source 1..90: mol_type = other RNA
ggggtcccccgactctggctttcccccaggtctacatgttcctggtgaaatggcaggacctgtcggagaaggtggtctaccggcggttca

SEQ ID NO: 29657 - RNA, 90 nt, synthetic construct
  source 1..90: mol_type = other RNA
ggggtcccccgactctggctttcccccaggtgtacatgttcctggtgaaatggcaggacctgtcggagaaggtggtctaccggagattca

SEQ ID NO: 29658 - RNA, 90 nt, synthetic construct
  source 1..90: mol_type = other RNA
ggggtcccccgactctggctttcccccaggtatacatgttcctggtgaaatggcaggacctgtcggagaaggtggtctaccggcggttca

SEQ ID NO: 29659 - RNA, 90 nt, synthetic construct
  source 1..90: mol_type = other RNA
ggggtcccccgactctggctttcccccaggtgtacatgttcctggtgaaatggcaggacctgtcggagaaggtggtctaccggaggttca

SEQ ID NO: 29660 - RNA, 90 nt, synthetic construct
  source 1..90: mol_type = other RNA
ggggtcccccgactctggctttcccccaggtgtacatgttcctggtgaaatggcaggacctgtcggagaaggtggtctaccggcgcttca

SEQ ID NO: 29661 - RNA, 90 nt, synthetic construct
  source 1..90: mol_type = other RNA
ggggtcccccgactctggctttcccccaggtgtacatgttcctggtgaaatggcaggacctgtcggagaaggtggtctaccggcggttca

SEQ ID NO: 29662 - RNA, 90 nt, synthetic construct
  source 1..90: mol_type = other RNA
ggggtcccccgactctggctttcccccaggtgtacatgttcctggtgaaatggcaggacctgtcggagaaggtggtctaccggcgtttca

SEQ ID NO: 29663 - RNA, 90 nt, synthetic construct
  source 1..90: mol_type = other RNA
ggggtcccccgactctggctttcccccaggtttacatgttcctggtgaaatggcaggacctgtcggagaaggtggtctaccggaggttca

SEQ ID NO: 29664 - RNA, 90 nt, synthetic construct
  source 1..90: mol_type = other RNA
ggggtcccccgactctggctttcccccaggtttacatgttcctggtgaaatggcaggacctgtcggagaaggtggtctaccggcgcttca

SEQ ID NO: 29665 - RNA, 90 nt, synthetic construct
  source 1..90: mol_type = other RNA
ggggtcccccgactctggctttcccccaggtatacatgttcctggtgaaatggcaggacctgtcggagaaggtggtctaccggcgcttca

SEQ ID NO: 29666 - RNA, 90 nt, synthetic construct
  source 1..90: mol_type = other RNA
ggggtcccccgactctggctttcccccaggtgtacatgttcctggtgaaatggcaggacctgtcggagaaggtggtctaccggcgattca

SEQ ID NO: 29667 - RNA, 90 nt, synthetic construct
  source 1..90: mol_type = other RNA
ggggtcccccgactctggctttcccccaggtttacatgttcctggtgaaatggcaggacctgtcggagaaggtggtctaccggagattca

SEQ ID NO: 29668 - RNA, 90 nt, synthetic construct
  source 1..90: mol_type = other RNA
ggggtcccccgactctggctttcccccaggtatacatgttcctggtgaaatggcaggacctgtcggagaaggtggtctaccggcgattca

SEQ ID NO: 29669 - RNA, 90 nt, synthetic construct
  source 1..90: mol_type = other RNA
ggggtcccccgactctggctttcccccaggtatacatgttcctggtgaaatggcaggacctgtcggagaaggtggtctaccggcgtttca

SEQ ID NO: 29670 - RNA, 90 nt, synthetic construct
  source 1..90: mol_type = other RNA
ggggtcccccgactctggctttcccccaggtttacatgttcctggtgaaatggcaggacctgtcggagaaggtggtctaccggcggttca

SEQ ID NO: 29671 - RNA, 90 nt, synthetic construct
  source 1..90: mol_type = other RNA
ggggtcccccgactctggctttcccccaggtttacatgttcctggtgaaatggcaggacctgtcggagaaggtggtctaccggcgtttca

SEQ ID NO: 29672 - RNA, 90 nt, synthetic construct
  source 1..90: mol_type = other RNA
ggggtcccccgactctggctttcccccaggtctacatgttcctggtgaaatggcaggacctgtcggagaaggtggtctaccggagattca

SEQ ID NO: 29673 - RNA, 90 nt, synthetic construct
  source 1..90: mol_type = other RNA
ggggtcccccgactctggctttcccccaggtctacatgttcctggtgaaatggcaggacctgtcggagaaggtggtctaccggcgtttca

SEQ ID NO: 29674 - RNA, 90 nt, synthetic construct
  source 1..90: mol_type = other RNA
ggggtcccccgactctggctttcccccaggtatacatgttcctggtgaaatggcaggacctgtcggagaaggtggtctaccggagattca

SEQ ID NO: 29675 - RNA, 90 nt, synthetic construct
  source 1..90: mol_type = other RNA
ggggtcccccgactctggctttcccccaggtctacatgttcctggtgaaatggcaggacctgtcggagaaggtggtctaccggaggttca

SEQ ID NO: 29676 - RNA, 90 nt, synthetic construct
  source 1..90: mol_type = other RNA
ggggtcccccgactctggctttcccccaggtttacatgttcctggtgaaatggcaggacctgtcggagaaggtggtctaccggcgattca

SEQ ID NO: 29677 - RNA, 91 nt, synthetic construct
  source 1..91: mol_type = other RNA
tggggtcccccgactctggctttcccccaggtgtacatgttcctggtgaaatggcaggacctgtcggagaaggtggtctaccggagattca

SEQ ID NO: 29678 - RNA, 91 nt, synthetic construct
  source 1..91: mol_type = other RNA
tggggtcccccgactctggctttcccccaggtatacatgttcctggtgaaatggcaggacctgtcggagaaggtggtctaccggaggttca

SEQ ID NO: 29679 - RNA, 91 nt, synthetic construct
  source 1..91: mol_type = other RNA
tggggtcccccgactctggctttcccccaggtgtacatgttcctggtgaaatggcaggacctgtcggagaaggtggtctaccggcgattca

SEQ ID NO: 29680 - RNA, 91 nt, synthetic construct
  source 1..91: mol_type = other RNA
tggggtcccccgactctggctttcccccaggtgtacatgttcctggtgaaatggcaggacctgtcggagaaggtggtctaccggcgcttca

SEQ ID NO: 29681 - RNA, 91 nt, synthetic construct
  source 1..91: mol_type = other RNA
tggggtcccccgactctggctttcccccaggtatacatgttcctggtgaaatggcaggacctgtcggagaaggtggtctaccggcgtttca

SEQ ID NO: 29682 - RNA, 91 nt, synthetic construct
  source 1..91: mol_type = other RNA
tggggtcccccgactctggctttcccccaggtttacatgttcctggtgaaatggcaggacctgtcggagaaggtggtctaccggagattca

SEQ ID NO: 29683 - RNA, 91 nt, synthetic construct
  source 1..91: mol_type = other RNA
tggggtcccccgactctggctttcccccaggtttacatgttcctggtgaaatggcaggacctgtcggagaaggtggtctaccggaggttca

SEQ ID NO: 29684 - RNA, 91 nt, synthetic construct
  source 1..91: mol_type = other RNA
tggggtcccccgactctggctttcccccaggtttacatgttcctggtgaaatggcaggacctgtcggagaaggtggtctaccggcgattca

SEQ ID NO: 29685 - RNA, 91 nt, synthetic construct
  source 1..91: mol_type = other RNA
tggggtcccccgactctggctttcccccaggtttacatgttcctggtgaaatggcaggacctgtcggagaaggtggtctaccggcgcttca

SEQ ID NO: 29686 - RNA, 91 nt, synthetic construct
  source 1..91: mol_type = other RNA
tggggtcccccgactctggctttcccccaggtttacatgttcctggtgaaatggcaggacctgtcggagaaggtggtctaccggcggttca

SEQ ID NO: 29687 - RNA, 91 nt, synthetic construct
  source 1..91: mol_type = other RNA
tggggtcccccgactctggctttcccccaggtttacatgttcctggtgaaatggcaggacctgtcggagaaggtggtctaccggcgtttca

SEQ ID NO: 29688 - RNA, 91 nt, synthetic construct
  source 1..91: mol_type = other RNA
tggggtcccccgactctggctttcccccaggtatacatgttcctggtgaaatggcaggacctgtcggagaaggtggtctaccggagattca

SEQ ID NO: 29689 - RNA, 91 nt, synthetic construct
  source 1..91: mol_type = other RNA
tggggtcccccgactctggctttcccccaggtgtacatgttcctggtgaaatggcaggacctgtcggagaaggtggtctaccggcggttca

SEQ ID NO: 29690 - RNA, 91 nt, synthetic construct
  source 1..91: mol_type = other RNA
tggggtcccccgactctggctttcccccaggtgtacatgttcctggtgaaatggcaggacctgtcggagaaggtggtctaccggcgtttca

SEQ ID NO: 29691 - RNA, 91 nt, synthetic construct
  source 1..91: mol_type = other RNA
tggggtcccccgactctggctttcccccaggtctacatgttcctggtgaaatggcaggacctgtcggagaaggtggtctaccggcgtttca

SEQ ID NO: 29692 - RNA, 91 nt, synthetic construct
  source 1..91: mol_type = other RNA
tggggtcccccgactctggctttcccccaggtatacatgttcctggtgaaatggcaggacctgtcggagaaggtggtctaccggcggttca

SEQ ID NO: 29693 - RNA, 91 nt, synthetic construct
  source 1..91: mol_type = other RNA
tggggtcccccgactctggctttcccccaggtatacatgttcctggtgaaatggcaggacctgtcggagaaggtggtctaccggcgattca

SEQ ID NO: 29694 - RNA, 91 nt, synthetic construct
  source 1..91: mol_type = other RNA
tggggtcccccgactctggctttcccccaggtatacatgttcctggtgaaatggcaggacctgtcggagaaggtggtctaccggcgcttca

SEQ ID NO: 29695 - RNA, 91 nt, synthetic construct
  source 1..91: mol_type = other RNA
tggggtcccccgactctggctttcccccaggtgtacatgttcctggtgaaatggcaggacctgtcggagaaggtggtctaccggaggttca

SEQ ID NO: 29696 - RNA, 91 nt, synthetic construct
  source 1..91: mol_type = other RNA
tggggtcccccgactctggctttcccccaggtctacatgttcctggtgaaatggcaggacctgtcggagaaggtggtctaccggcggttca

SEQ ID NO: 29697 - RNA, 91 nt, synthetic construct
  source 1..91: mol_type = other RNA
tggggtcccccgactctggctttcccccaggtctacatgttcctggtgaaatggcaggacctgtcggagaaggtggtctaccggcgattca

SEQ ID NO: 29698 - RNA, 91 nt, synthetic construct
  source 1..91: mol_type = other RNA
tggggtcccccgactctggctttcccccaggtctacatgttcctggtgaaatggcaggacctgtcggagaaggtggtctaccggcgcttca

SEQ ID NO: 29699 - RNA, 91 nt, synthetic construct
  source 1..91: mol_type = other RNA
tggggtcccccgactctggctttcccccaggtctacatgttcctggtgaaatggcaggacctgtcggagaaggtggtctaccggagattca

SEQ ID NO: 29700 - RNA, 91 nt, synthetic construct
  source 1..91: mol_type = other RNA
tggggtcccccgactctggctttcccccaggtctacatgttcctggtgaaatggcaggacctgtcggagaaggtggtctaccggaggttca

SEQ ID NO: 29701 - RNA, 92 nt, synthetic construct
  source 1..92: mol_type = other RNA
atggggtcccccgactctggctttcccccaggtctacatgttcctggtgaaatggcaggacctgtcggagaaggtggtctaccggcgcttca

SEQ ID NO: 29702 - RNA, 92 nt, synthetic construct
  source 1..92: mol_type = other RNA
atggggtcccccgactctggctttcccccaggtctacatgttcctggtgaaatggcaggacctgtcggagaaggtggtctaccggaggttca

SEQ ID NO: 29703 - RNA, 92 nt, synthetic construct
  source 1..92: mol_type = other RNA
atggggtcccccgactctggctttcccccaggtctacatgttcctggtgaaatggcaggacctgtcggagaaggtggtctaccggagattca

SEQ ID NO: 29704 - RNA, 92 nt, synthetic construct
  source 1..92: mol_type = other RNA
atggggtcccccgactctggctttcccccaggtatacatgttcctggtgaaatggcaggacctgtcggagaaggtggtctaccggcgtttca

SEQ ID NO: 29705 - RNA, 92 nt, synthetic construct
  source 1..92: mol_type = other RNA
atggggtcccccgactctggctttcccccaggtctacatgttcctggtgaaatggcaggacctgtcggagaaggtggtctaccggcgattca

SEQ ID NO: 29706 - RNA, 92 nt, synthetic construct
  source 1..92: mol_type = other RNA
atggggtcccccgactctggctttcccccaggtatacatgttcctggtgaaatggcaggacctgtcggagaaggtggtctaccggcgcttca

SEQ ID NO: 29707 - RNA, 92 nt, synthetic construct
  source 1..92: mol_type = other RNA
atggggtcccccgactctggctttcccccaggtatacatgttcctggtgaaatggcaggacctgtcggagaaggtggtctaccggcgattca

SEQ ID NO: 29708 - RNA, 92 nt, synthetic construct
  source 1..92: mol_type = other RNA
atggggtcccccgactctggctttcccccaggtatacatgttcctggtgaaatggcaggacctgtcggagaaggtggtctaccggaggttca

SEQ ID NO: 29709 - RNA, 92 nt, synthetic construct
  source 1..92: mol_type = other RNA
atggggtcccccgactctggctttcccccaggtatacatgttcctggtgaaatggcaggacctgtcggagaaggtggtctaccggagattca

SEQ ID NO: 29710 - RNA, 92 nt, synthetic construct
  source 1..92: mol_type = other RNA
atggggtcccccgactctggctttcccccaggtctacatgttcctggtgaaatggcaggacctgtcggagaaggtggtctaccggcgtttca

SEQ ID NO: 29711 - RNA, 92 nt, synthetic construct
  source 1..92: mol_type = other RNA
atggggtcccccgactctggctttcccccaggtctacatgttcctggtgaaatggcaggacctgtcggagaaggtggtctaccggcggttca

SEQ ID NO: 29712 - RNA, 92 nt, synthetic construct
  source 1..92: mol_type = other RNA
atggggtcccccgactctggctttcccccaggtgtacatgttcctggtgaaatggcaggacctgtcggagaaggtggtctaccggaggttca

SEQ ID NO: 29713 - RNA, 92 nt, synthetic construct
  source 1..92: mol_type = other RNA
atggggtcccccgactctggctttcccccaggtttacatgttcctggtgaaatggcaggacctgtcggagaaggtggtctaccggagattca

SEQ ID NO: 29714 - RNA, 92 nt, synthetic construct
  source 1..92: mol_type = other RNA
atggggtcccccgactctggctttcccccaggtttacatgttcctggtgaaatggcaggacctgtcggagaaggtggtctaccggcgtttca

SEQ ID NO: 29715 - RNA, 92 nt, synthetic construct
  source 1..92: mol_type = other RNA
atggggtcccccgactctggctttcccccaggtttacatgttcctggtgaaatggcaggacctgtcggagaaggtggtctaccggcgattca

SEQ ID NO: 29716 - RNA, 92 nt, synthetic construct
  source 1..92: mol_type = other RNA
atggggtcccccgactctggctttcccccaggtttacatgttcctggtgaaatggcaggacctgtcggagaaggtggtctaccggcgcttca

SEQ ID NO: 29717 - RNA, 92 nt, synthetic construct
  source 1..92: mol_type = other RNA
atggggtcccccgactctggctttcccccaggtttacatgttcctggtgaaatggcaggacctgtcggagaaggtggtctaccggaggttca

SEQ ID NO: 29718 - RNA, 92 nt, synthetic construct
  source 1..92: mol_type = other RNA
atggggtcccccgactctggctttcccccaggtttacatgttcctggtgaaatggcaggacctgtcggagaaggtggtctaccggcggttca

SEQ ID NO: 29719 - RNA, 92 nt, synthetic construct
  source 1..92: mol_type = other RNA
atggggtcccccgactctggctttcccccaggtgtacatgttcctggtgaaatggcaggacctgtcggagaaggtggtctaccggcgtttca

SEQ ID NO: 29720 - RNA, 92 nt, synthetic construct
  source 1..92: mol_type = other RNA
atggggtcccccgactctggctttcccccaggtgtacatgttcctggtgaaatggcaggacctgtcggagaaggtggtctaccggcggttca

SEQ ID NO: 29721 - RNA, 92 nt, synthetic construct
  source 1..92: mol_type = other RNA
atggggtcccccgactctggctttcccccaggtgtacatgttcctggtgaaatggcaggacctgtcggagaaggtggtctaccggcgcttca

SEQ ID NO: 29722 - RNA, 92 nt, synthetic construct
  source 1..92: mol_type = other RNA
atggggtcccccgactctggctttcccccaggtgtacatgttcctggtgaaatggcaggacctgtcggagaaggtggtctaccggcgattca

SEQ ID NO: 29723 - RNA, 92 nt, synthetic construct
  source 1..92: mol_type = other RNA
atggggtcccccgactctggctttcccccaggtgtacatgttcctggtgaaatggcaggacctgtcggagaaggtggtctaccggagattca

SEQ ID NO: 29724 - RNA, 92 nt, synthetic construct
  source 1..92: mol_type = other RNA
atggggtcccccgactctggctttcccccaggtatacatgttcctggtgaaatggcaggacctgtcggagaaggtggtctaccggcggttca

SEQ ID NO: 29725 - RNA, 93 nt, synthetic construct
  source 1..93: mol_type = other RNA
aatggggtcccccgactctggctttcccccaggtttacatgttcctggtgaaatggcaggacctgtcggagaaggtggtctaccggcgtttca

SEQ ID NO: 29726 - RNA, 93 nt, synthetic construct
  source 1..93: mol_type = other RNA
aatggggtcccccgactctggctttcccccaggtgtacatgttcctggtgaaatggcaggacctgtcggagaaggtggtctaccggagattca

SEQ ID NO: 29727 - RNA, 93 nt, synthetic construct
  source 1..93: mol_type = other RNA
aatggggtcccccgactctggctttcccccaggtatacatgttcctggtgaaatggcaggacctgtcggagaaggtggtctaccggcgcttca

SEQ ID NO: 29728 - RNA, 93 nt, synthetic construct
  source 1..93: mol_type = other RNA
aatggggtcccccgactctggctttcccccaggtttacatgttcctggtgaaatggcaggacctgtcggagaaggtggtctaccggcgattca

SEQ ID NO: 29729 - RNA, 93 nt, synthetic construct
  source 1..93: mol_type = other RNA
aatggggtcccccgactctggctttcccccaggtgtacatgttcctggtgaaatggcaggacctgtcggagaaggtggtctaccggcgtttca

SEQ ID NO: 29730 - RNA, 93 nt, synthetic construct
  source 1..93: mol_type = other RNA
aatggggtcccccgactctggctttcccccaggtttacatgttcctggtgaaatggcaggacctgtcggagaaggtggtctaccggagattca

SEQ ID NO: 29731 - RNA, 93 nt, synthetic construct
  source 1..93: mol_type = other RNA
aatggggtcccccgactctggctttcccccaggtttacatgttcctggtgaaatggcaggacctgtcggagaaggtggtctaccggaggttca

SEQ ID NO: 29732 - RNA, 93 nt, synthetic construct
  source 1..93: mol_type = other RNA
aatggggtcccccgactctggctttcccccaggtgtacatgttcctggtgaaatggcaggacctgtcggagaaggtggtctaccggaggttca

SEQ ID NO: 29733 - RNA, 93 nt, synthetic construct
  source 1..93: mol_type = other RNA
aatggggtcccccgactctggctttcccccaggtgtacatgttcctggtgaaatggcaggacctgtcggagaaggtggtctaccggcgcttca

SEQ ID NO: 29734 - RNA, 93 nt, synthetic construct
  source 1..93: mol_type = other RNA
aatggggtcccccgactctggctttcccccaggtttacatgttcctggtgaaatggcaggacctgtcggagaaggtggtctaccggcggttca

SEQ ID NO: 29735 - RNA, 93 nt, synthetic construct
  source 1..93: mol_type = other RNA
aatggggtcccccgactctggctttcccccaggtgtacatgttcctggtgaaatggcaggacctgtcggagaaggtggtctaccggcggttca

SEQ ID NO: 29736 - RNA, 93 nt, synthetic construct
  source 1..93: mol_type = other RNA
aatggggtcccccgactctggctttcccccaggtgtacatgttcctggtgaaatggcaggacctgtcggagaaggtggtctaccggcgattca

SEQ ID NO: 29737 - RNA, 93 nt, synthetic construct
  source 1..93: mol_type = other RNA
aatggggtcccccgactctggctttcccccaggtctacatgttcctggtgaaatggcaggacctgtcggagaaggtggtctaccggagattca

SEQ ID NO: 29738 - RNA, 93 nt, synthetic construct
  source 1..93: mol_type = other RNA
aatggggtcccccgactctggctttcccccaggtatacatgttcctggtgaaatggcaggacctgtcggagaaggtggtctaccggaggttca

SEQ ID NO: 29739 - RNA, 93 nt, synthetic construct
  source 1..93: mol_type = other RNA
aatggggtcccccgactctggctttcccccaggtatacatgttcctggtgaaatggcaggacctgtcggagaaggtggtctaccggagattca

SEQ ID NO: 29740 - RNA, 93 nt, synthetic construct
  source 1..93: mol_type = other RNA
aatggggtcccccgactctggctttcccccaggtatacatgttcctggtgaaatggcaggacctgtcggagaaggtggtctaccggcgattca

SEQ ID NO: 29741 - RNA, 93 nt, synthetic construct
  source 1..93: mol_type = other RNA
aatggggtcccccgactctggctttcccccaggtatacatgttcctggtgaaatggcaggacctgtcggagaaggtggtctaccggcggttca

SEQ ID NO: 29742 - RNA, 93 nt, synthetic construct
  source 1..93: mol_type = other RNA
aatggggtcccccgactctggctttcccccaggtatacatgttcctggtgaaatggcaggacctgtcggagaaggtggtctaccggcgtttca

SEQ ID NO: 29743 - RNA, 93 nt, synthetic construct
  source 1..93: mol_type = other RNA
aatggggtcccccgactctggctttcccccaggtctacatgttcctggtgaaatggcaggacctgtcggagaaggtggtctaccggaggttca

SEQ ID NO: 29744 - RNA, 93 nt, synthetic construct
  source 1..93: mol_type = other RNA
aatggggtcccccgactctggctttcccccaggtctacatgttcctggtgaaatggcaggacctgtcggagaaggtggtctaccggcgattca

SEQ ID NO: 29745 - RNA, 93 nt, synthetic construct
  source 1..93: mol_type = other RNA
aatggggtcccccgactctggctttcccccaggtctacatgttcctggtgaaatggcaggacctgtcggagaaggtggtctaccggcgcttca

SEQ ID NO: 29746 - RNA, 93 nt, synthetic construct
  source 1..93: mol_type = other RNA
aatggggtcccccgactctggctttcccccaggtctacatgttcctggtgaaatggcaggacctgtcggagaaggtggtctaccggcggttca

SEQ ID NO: 29747 - RNA, 93 nt, synthetic construct
  source 1..93: mol_type = other RNA
aatggggtcccccgactctggctttcccccaggtctacatgttcctggtgaaatggcaggacctgtcggagaaggtggtctaccggcgtttca

SEQ ID NO: 29748 - RNA, 93 nt, synthetic construct
  source 1..93: mol_type = other RNA
aatggggtcccccgactctggctttcccccaggtttacatgttcctggtgaaatggcaggacctgtcggagaaggtggtctaccggcgcttca

SEQ ID NO: 29749 - RNA, 94 nt, synthetic construct
  source 1..94: mol_type = other RNA
gaatggggtcccccgactctggctttcccccaggtgtacatgttcctggtgaaatggcaggacctgtcggagaaggtggtctaccggcgtttca

SEQ ID NO: 29750 - RNA, 94 nt, synthetic construct
  source 1..94: mol_type = other RNA
gaatggggtcccccgactctggctttcccccaggtttacatgttcctggtgaaatggcaggacctgtcggagaaggtggtctaccggaggttca

SEQ ID NO: 29751 - RNA, 94 nt, synthetic construct
  source 1..94: mol_type = other RNA
gaatggggtcccccgactctggctttcccccaggtgtacatgttcctggtgaaatggcaggacctgtcggagaaggtggtctaccggagattca

SEQ ID NO: 29752 - RNA, 94 nt, synthetic construct
  source 1..94: mol_type = other RNA
gaatggggtcccccgactctggctttcccccaggtttacatgttcctggtgaaatggcaggacctgtcggagaaggtggtctaccggcgcttca

SEQ ID NO: 29753 - RNA, 94 nt, synthetic construct
  source 1..94: mol_type = other RNA
gaatggggtcccccgactctggctttcccccaggtgtacatgttcctggtgaaatggcaggacctgtcggagaaggtggtctaccggaggttca

SEQ ID NO: 29754 - RNA, 94 nt, synthetic construct
  source 1..94: mol_type = other RNA
gaatggggtcccccgactctggctttcccccaggtttacatgttcctggtgaaatggcaggacctgtcggagaaggtggtctaccggcgtttca

SEQ ID NO: 29755 - RNA, 94 nt, synthetic construct
  source 1..94: mol_type = other RNA
gaatggggtcccccgactctggctttcccccaggtgtacatgttcctggtgaaatggcaggacctgtcggagaaggtggtctaccggcgcttca

SEQ ID NO: 29756 - RNA, 94 nt, synthetic construct
  source 1..94: mol_type = other RNA
gaatggggtcccccgactctggctttcccccaggtttacatgttcctggtgaaatggcaggacctgtcggagaaggtggtctaccggcgattca

SEQ ID NO: 29757 - RNA, 94 nt, synthetic construct
  source 1..94: mol_type = other RNA
gaatggggtcccccgactctggctttcccccaggtgtacatgttcctggtgaaatggcaggacctgtcggagaaggtggtctaccggcgattca

SEQ ID NO: 29758 - RNA, 94 nt, synthetic construct
  source 1..94: mol_type = other RNA
gaatggggtcccccgactctggctttcccccaggtctacatgttcctggtgaaatggcaggacctgtcggagaaggtggtctaccggaggttca

SEQ ID NO: 29759 - RNA, 94 nt, synthetic construct
  source 1..94: mol_type = other RNA
gaatggggtcccccgactctggctttcccccaggtctacatgttcctggtgaaatggcaggacctgtcggagaaggtggtctaccggcgtttca

SEQ ID NO: 29760 - RNA, 94 nt, synthetic construct
  source 1..94: mol_type = other RNA
gaatggggtcccccgactctggctttcccccaggtctacatgttcctggtgaaatggcaggacctgtcggagaaggtggtctaccggcggttca

SEQ ID NO: 29761 - RNA, 94 nt, synthetic construct
  source 1..94: mol_type = other RNA
gaatggggtcccccgactctggctttcccccaggtctacatgttcctggtgaaatggcaggacctgtcggagaaggtggtctaccggcgcttca

SEQ ID NO: 29762 - RNA, 94 nt, synthetic construct
  source 1..94: mol_type = other RNA
gaatggggtcccccgactctggctttcccccaggtctacatgttcctggtgaaatggcaggacctgtcggagaaggtggtctaccggcgattca

SEQ ID NO: 29763 - RNA, 94 nt, synthetic construct
  source 1..94: mol_type = other RNA
gaatggggtcccccgactctggctttcccccaggtgtacatgttcctggtgaaatggcaggacctgtcggagaaggtggtctaccggcggttca

SEQ ID NO: 29764 - RNA, 94 nt, synthetic construct
  source 1..94: mol_type = other RNA
gaatggggtcccccgactctggctttcccccaggtctacatgttcctggtgaaatggcaggacctgtcggagaaggtggtctaccggagattca

SEQ ID NO: 29765 - RNA, 94 nt, synthetic construct
  source 1..94: mol_type = other RNA
gaatggggtcccccgactctggctttcccccaggtatacatgttcctggtgaaatggcaggacctgtcggagaaggtggtctaccggcggttca

SEQ ID NO: 29766 - RNA, 94 nt, synthetic construct
  source 1..94: mol_type = other RNA
gaatggggtcccccgactctggctttcccccaggtatacatgttcctggtgaaatggcaggacctgtcggagaaggtggtctaccggcgcttca

SEQ ID NO: 29767 - RNA, 94 nt, synthetic construct
  source 1..94: mol_type = other RNA
gaatggggtcccccgactctggctttcccccaggtatacatgttcctggtgaaatggcaggacctgtcggagaaggtggtctaccggcgattca

SEQ ID NO: 29768 - RNA, 94 nt, synthetic construct
  source 1..94: mol_type = other RNA
gaatggggtcccccgactctggctttcccccaggtatacatgttcctggtgaaatggcaggacctgtcggagaaggtggtctaccggaggttca

SEQ ID NO: 29769 - RNA, 94 nt, synthetic construct
  source 1..94: mol_type = other RNA
gaatggggtcccccgactctggctttcccccaggtatacatgttcctggtgaaatggcaggacctgtcggagaaggtggtctaccggagattca

SEQ ID NO: 29770 - RNA, 94 nt, synthetic construct
  source 1..94: mol_type = other RNA
gaatggggtcccccgactctggctttcccccaggtttacatgttcctggtgaaatggcaggacctgtcggagaaggtggtctaccggcggttca

SEQ ID NO: 29771 - RNA, 94 nt, synthetic construct
  source 1..94: mol_type = other RNA
gaatggggtcccccgactctggctttcccccaggtatacatgttcctggtgaaatggcaggacctgtcggagaaggtggtctaccggcgtttca

SEQ ID NO: 29772 - RNA, 94 nt, synthetic construct
  source 1..94: mol_type = other RNA
gaatggggtcccccgactctggctttcccccaggtttacatgttcctggtgaaatggcaggacctgtcggagaaggtggtctaccggagattca

SEQ ID NO: 29773 - RNA, 95 nt, synthetic construct
  source 1..95: mol_type = other RNA
tgaatggggtcccccgactctggctttcccccaggtatacatgttcctggtgaaatggcaggacctgtcggagaaggtggtctaccggagattca

SEQ ID NO: 29774 - RNA, 95 nt, synthetic construct
  source 1..95: mol_type = other RNA
tgaatggggtcccccgactctggctttcccccaggtatacatgttcctggtgaaatggcaggacctgtcggagaaggtggtctaccggaggttca

SEQ ID NO: 29775 - RNA, 95 nt, synthetic construct
  source 1..95: mol_type = other RNA
tgaatggggtcccccgactctggctttcccccaggtatacatgttcctggtgaaatggcaggacctgtcggagaaggtggtctaccggcgattca

SEQ ID NO: 29776 - RNA, 95 nt, synthetic construct
  source 1..95: mol_type = other RNA
tgaatggggtcccccgactctggctttcccccaggtatacatgttcctggtgaaatggcaggacctgtcggagaaggtggtctaccggcgcttca

SEQ ID NO: 29777 - RNA, 95 nt, synthetic construct
  source 1..95: mol_type = other RNA
tgaatggggtcccccgactctggctttcccccaggtctacatgttcctggtgaaatggcaggacctgtcggagaaggtggtctaccggcggttca

SEQ ID NO: 29778 - RNA, 95 nt, synthetic construct
  source 1..95: mol_type = other RNA
tgaatggggtcccccgactctggctttcccccaggtatacatgttcctggtgaaatggcaggacctgtcggagaaggtggtctaccggcgtttca

SEQ ID NO: 29779 - RNA, 95 nt, synthetic construct
  source 1..95: mol_type = other RNA
tgaatggggtcccccgactctggctttcccccaggtctacatgttcctggtgaaatggcaggacctgtcggagaaggtggtctaccggagattca

SEQ ID NO: 29780 - RNA, 95 nt, synthetic construct
  source 1..95: mol_type = other RNA
tgaatggggtcccccgactctggctttcccccaggtctacatgttcctggtgaaatggcaggacctgtcggagaaggtggtctaccggaggttca

SEQ ID NO: 29781 - RNA, 95 nt, synthetic construct
  source 1..95: mol_type = other RNA
tgaatggggtcccccgactctggctttcccccaggtgtacatgttcctggtgaaatggcaggacctgtcggagaaggtggtctaccggagattca

SEQ ID NO: 29782 - RNA, 95 nt, synthetic construct
  source 1..95: mol_type = other RNA
tgaatggggtcccccgactctggctttcccccaggtatacatgttcctggtgaaatggcaggacctgtcggagaaggtggtctaccggcggttca

SEQ ID NO: 29783 - RNA, 95 nt, synthetic construct
  source 1..95: mol_type = other RNA
tgaatggggtcccccgactctggctttcccccaggtctacatgttcctggtgaaatggcaggacctgtcggagaaggtggtctaccggcgtttca

SEQ ID NO: 29784 - RNA, 95 nt, synthetic construct
  source 1..95: mol_type = other RNA
tgaatggggtcccccgactctggctttcccccaggtttacatgttcctggtgaaatggcaggacctgtcggagaaggtggtctaccggcgcttca

SEQ ID NO: 29785 - RNA, 95 nt, synthetic construct
  source 1..95: mol_type = other RNA
tgaatggggtcccccgactctggctttcccccaggtgtacatgttcctggtgaaatggcaggacctgtcggagaaggtggtctaccggaggttca

SEQ ID NO: 29786 - RNA, 95 nt, synthetic construct
  source 1..95: mol_type = other RNA
tgaatggggtcccccgactctggctttcccccaggtttacatgttcctggtgaaatggcaggacctgtcggagaaggtggtctaccggaggttca

SEQ ID NO: 29787 - RNA, 95 nt, synthetic construct
  source 1..95: mol_type = other RNA
tgaatggggtcccccgactctggctttcccccaggtgtacatgttcctggtgaaatggcaggacctgtcggagaaggtggtctaccggcgattca

SEQ ID NO: 29788 - RNA, 95 nt, synthetic construct
  source 1..95: mol_type = other RNA
tgaatggggtcccccgactctggctttcccccaggtttacatgttcctggtgaaatggcaggacctgtcggagaaggtggtctaccggcgtttca

SEQ ID NO: 29789 - RNA, 95 nt, synthetic construct
  source 1..95: mol_type = other RNA
tgaatggggtcccccgactctggctttcccccaggtttacatgttcctggtgaaatggcaggacctgtcggagaaggtggtctaccggcggttca

SEQ ID NO: 29790 - RNA, 95 nt, synthetic construct
  source 1..95: mol_type = other RNA
tgaatggggtcccccgactctggctttcccccaggtttacatgttcctggtgaaatggcaggacctgtcggagaaggtggtctaccggcgattca

SEQ ID NO: 29791 - RNA, 95 nt, synthetic construct
  source 1..95: mol_type = other RNA
tgaatggggtcccccgactctggctttcccccaggtttacatgttcctggtgaaatggcaggacctgtcggagaaggtggtctaccggagattca

SEQ ID NO: 29792 - RNA, 95 nt, synthetic construct
  source 1..95: mol_type = other RNA
tgaatggggtcccccgactctggctttcccccaggtgtacatgttcctggtgaaatggcaggacctgtcggagaaggtggtctaccggcgtttca

SEQ ID NO: 29793 - RNA, 95 nt, synthetic construct
  source 1..95: mol_type = other RNA
tgaatggggtcccccgactctggctttcccccaggtgtacatgttcctggtgaaatggcaggacctgtcggagaaggtggtctaccggcggttca

SEQ ID NO: 29794 - RNA, 95 nt, synthetic construct
  source 1..95: mol_type = other RNA
tgaatggggtcccccgactctggctttcccccaggtgtacatgttcctggtgaaatggcaggacctgtcggagaaggtggtctaccggcgcttca

SEQ ID NO: 29795 - RNA, 95 nt, synthetic construct
  source 1..95: mol_type = other RNA
tgaatggggtcccccgactctggctttcccccaggtctacatgttcctggtgaaatggcaggacctgtcggagaaggtggtctaccggcgcttca

SEQ ID NO: 29796 - RNA, 95 nt, synthetic construct
  source 1..95: mol_type = other RNA
tgaatggggtcccccgactctggctttcccccaggtctacatgttcctggtgaaatggcaggacctgtcggagaaggtggtctaccggcgattca

SEQ ID NO: 29797 - RNA, 96 nt, synthetic construct
  source 1..96: mol_type = other RNA
ctgaatggggtcccccgactctggctttcccccaggtctacatgttcctggtgaaatggcaggacctgtcggagaaggtggtctaccggcgtttca

SEQ ID NO: 29798 - RNA, 96 nt, synthetic construct
  source 1..96: mol_type = other RNA
ctgaatggggtcccccgactctggctttcccccaggtgtacatgttcctggtgaaatggcaggacctgtcggagaaggtggtctaccggaggttca

SEQ ID NO: 29799 - RNA, 96 nt, synthetic construct
  source 1..96: mol_type = other RNA
ctgaatggggtcccccgactctggctttcccccaggtttacatgttcctggtgaaatggcaggacctgtcggagaaggtggtctaccggcgcttca

SEQ ID NO: 29800 - RNA, 96 nt, synthetic construct
  source 1..96: mol_type = other RNA
ctgaatggggtcccccgactctggctttcccccaggtttacatgttcctggtgaaatggcaggacctgtcggagaaggtggtctaccggcgattca

SEQ ID NO: 29801 - RNA, 96 nt, synthetic construct
  source 1..96: mol_type = other RNA
ctgaatggggtcccccgactctggctttcccccaggtttacatgttcctggtgaaatggcaggacctgtcggagaaggtggtctaccggaggttca

SEQ ID NO: 29802 - RNA, 96 nt, synthetic construct
  source 1..96: mol_type = other RNA
ctgaatggggtcccccgactctggctttcccccaggtttacatgttcctggtgaaatggcaggacctgtcggagaaggtggtctaccggcggttca

SEQ ID NO: 29803 - RNA, 96 nt, synthetic construct
  source 1..96: mol_type = other RNA
ctgaatggggtcccccgactctggctttcccccaggtatacatgttcctggtgaaatggcaggacctgtcggagaaggtggtctaccggcgtttca

SEQ ID NO: 29804 - RNA, 96 nt, synthetic construct
  source 1..96: mol_type = other RNA
ctgaatggggtcccccgactctggctttcccccaggtctacatgttcctggtgaaatggcaggacctgtcggagaaggtggtctaccggcgcttca

SEQ ID NO: 29805 - RNA, 96 nt, synthetic construct
  source 1..96: mol_type = other RNA
ctgaatggggtcccccgactctggctttcccccaggtatacatgttcctggtgaaatggcaggacctgtcggagaaggtggtctaccggagattca

SEQ ID NO: 29806 - RNA, 96 nt, synthetic construct
  source 1..96: mol_type = other RNA
ctgaatggggtcccccgactctggctttcccccaggtatacatgttcctggtgaaatggcaggacctgtcggagaaggtggtctaccggaggttca

SEQ ID NO: 29807 - RNA, 96 nt, synthetic construct
  source 1..96: mol_type = other RNA
ctgaatggggtcccccgactctggctttcccccaggtttacatgttcctggtgaaatggcaggacctgtcggagaaggtggtctaccggagattca

SEQ ID NO: 29808 - RNA, 96 nt, synthetic construct
  source 1..96: mol_type = other RNA
ctgaatggggtcccccgactctggctttcccccaggtgtacatgttcctggtgaaatggcaggacctgtcggagaaggtggtctaccggcgtttca

SEQ ID NO: 29809 - RNA, 96 nt, synthetic construct
  source 1..96: mol_type = other RNA
ctgaatggggtcccccgactctggctttcccccaggtgtacatgttcctggtgaaatggcaggacctgtcggagaaggtggtctaccggcggttca

SEQ ID NO: 29810 - RNA, 96 nt, synthetic construct
  source 1..96: mol_type = other RNA
ctgaatggggtcccccgactctggctttcccccaggtgtacatgttcctggtgaaatggcaggacctgtcggagaaggtggtctaccggcgcttca

SEQ ID NO: 29811 - RNA, 96 nt, synthetic construct
  source 1..96: mol_type = other RNA
ctgaatggggtcccccgactctggctttcccccaggtgtacatgttcctggtgaaatggcaggacctgtcggagaaggtggtctaccggcgattca

SEQ ID NO: 29812 - RNA, 96 nt, synthetic construct
  source 1..96: mol_type = other RNA
ctgaatggggtcccccgactctggctttcccccaggtgtacatgttcctggtgaaatggcaggacctgtcggagaaggtggtctaccggagattca

SEQ ID NO: 29813 - RNA, 96 nt, synthetic construct
  source 1..96: mol_type = other RNA
ctgaatggggtcccccgactctggctttcccccaggtctacatgttcctggtgaaatggcaggacctgtcggagaaggtggtctaccggcggttca

SEQ ID NO: 29814 - RNA, 96 nt, synthetic construct
  source 1..96: mol_type = other RNA
ctgaatggggtcccccgactctggctttcccccaggtctacatgttcctggtgaaatggcaggacctgtcggagaaggtggtctaccggcgattca

SEQ ID NO: 29815 - RNA, 96 nt, synthetic construct
  source 1..96: mol_type = other RNA
ctgaatggggtcccccgactctggctttcccccaggtctacatgttcctggtgaaatggcaggacctgtcggagaaggtggtctaccggaggttca

SEQ ID NO: 29816 - RNA, 96 nt, synthetic construct
  source 1..96: mol_type = other RNA
ctgaatggggtcccccgactctggctttcccccaggtctacatgttcctggtgaaatggcaggacctgtcggagaaggtggtctaccggagattca

SEQ ID NO: 29817 - RNA, 96 nt, synthetic construct
  source 1..96: mol_type = other RNA
ctgaatggggtcccccgactctggctttcccccaggtatacatgttcctggtgaaatggcaggacctgtcggagaaggtggtctaccggcggttca

SEQ ID NO: 29818 - RNA, 96 nt, synthetic construct
  source 1..96: mol_type = other RNA
ctgaatggggtcccccgactctggctttcccccaggtatacatgttcctggtgaaatggcaggacctgtcggagaaggtggtctaccggcgcttca

SEQ ID NO: 29819 - RNA, 96 nt, synthetic construct
  source 1..96: mol_type = other RNA
ctgaatggggtcccccgactctggctttcccccaggtatacatgttcctggtgaaatggcaggacctgtcggagaaggtggtctaccggcgattca

SEQ ID NO: 29820 - RNA, 96 nt, synthetic construct
  source 1..96: mol_type = other RNA
ctgaatggggtcccccgactctggctttcccccaggtttacatgttcctggtgaaatggcaggacctgtcggagaaggtggtctaccggcgtttca

SEQ ID NO: 29821 - RNA, 97 nt, synthetic construct
  source 1..97: mol_type = other RNA
gctgaatggggtcccccgactctggctttcccccaggtatacatgttcctggtgaaatggcaggacctgtcggagaaggtggtctaccggcgattca

SEQ ID NO: 29822 - RNA, 97 nt, synthetic construct
  source 1..97: mol_type = other RNA
gctgaatggggtcccccgactctggctttcccccaggtctacatgttcctggtgaaatggcaggacctgtcggagaaggtggtctaccggaggttca

SEQ ID NO: 29823 - RNA, 97 nt, synthetic construct
  source 1..97: mol_type = other RNA
gctgaatggggtcccccgactctggctttcccccaggtatacatgttcctggtgaaatggcaggacctgtcggagaaggtggtctaccggagattca

SEQ ID NO: 29824 - RNA, 97 nt, synthetic construct
  source 1..97: mol_type = other RNA
gctgaatggggtcccccgactctggctttcccccaggtatacatgttcctggtgaaatggcaggacctgtcggagaaggtggtctaccggaggttca

SEQ ID NO: 29825 - RNA, 97 nt, synthetic construct
  source 1..97: mol_type = other RNA
gctgaatggggtcccccgactctggctttcccccaggtatacatgttcctggtgaaatggcaggacctgtcggagaaggtggtctaccggcgcttca

SEQ ID NO: 29826 - RNA, 97 nt, synthetic construct
  source 1..97: mol_type = other RNA
gctgaatggggtcccccgactctggctttcccccaggtttacatgttcctggtgaaatggcaggacctgtcggagaaggtggtctaccggaggttca

SEQ ID NO: 29827 - RNA, 97 nt, synthetic construct
  source 1..97: mol_type = other RNA
gctgaatggggtcccccgactctggctttcccccaggtatacatgttcctggtgaaatggcaggacctgtcggagaaggtggtctaccggcgtttca

SEQ ID NO: 29828 - RNA, 97 nt, synthetic construct
  source 1..97: mol_type = other RNA
gctgaatggggtcccccgactctggctttcccccaggtctacatgttcctggtgaaatggcaggacctgtcggagaaggtggtctaccggagattca

SEQ ID NO: 29829 - RNA, 97 nt, synthetic construct
  source 1..97: mol_type = other RNA
gctgaatggggtcccccgactctggctttcccccaggtatacatgttcctggtgaaatggcaggacctgtcggagaaggtggtctaccggcggttca

SEQ ID NO: 29830 - RNA, 97 nt, synthetic construct
  source 1..97: mol_type = other RNA
gctgaatggggtcccccgactctggctttcccccaggtgtacatgttcctggtgaaatggcaggacctgtcggagaaggtggtctaccggaggttca

SEQ ID NO: 29831 - RNA, 97 nt, synthetic construct
  source 1..97: mol_type = other RNA
gctgaatggggtcccccgactctggctttcccccaggtctacatgttcctggtgaaatggcaggacctgtcggagaaggtggtctaccggcgattca

SEQ ID NO: 29832 - RNA, 97 nt, synthetic construct
  source 1..97: mol_type = other RNA
gctgaatggggtcccccgactctggctttcccccaggtctacatgttcctggtgaaatggcaggacctgtcggagaaggtggtctaccggcgcttca

SEQ ID NO: 29833 - RNA, 97 nt, synthetic construct
  source 1..97: mol_type = other RNA
gctgaatggggtcccccgactctggctttcccccaggtttacatgttcctggtgaaatggcaggacctgtcggagaaggtggtctaccggcgattca

SEQ ID NO: 29834 - RNA, 97 nt, synthetic construct
  source 1..97: mol_type = other RNA
gctgaatggggtcccccgactctggctttcccccaggtttacatgttcctggtgaaatggcaggacctgtcggagaaggtggtctaccggcgtttca

SEQ ID NO: 29835 - RNA, 97 nt, synthetic construct
  source 1..97: mol_type = other RNA
gctgaatggggtcccccgactctggctttcccccaggtgtacatgttcctggtgaaatggcaggacctgtcggagaaggtggtctaccggcgcttca

SEQ ID NO: 29836 - RNA, 97 nt, synthetic construct
  source 1..97: mol_type = other RNA
gctgaatggggtcccccgactctggctttcccccaggtgtacatgttcctggtgaaatggcaggacctgtcggagaaggtggtctaccggcggttca

SEQ ID NO: 29837 - RNA, 97 nt, synthetic construct
  source 1..97: mol_type = other RNA
gctgaatggggtcccccgactctggctttcccccaggtgtacatgttcctggtgaaatggcaggacctgtcggagaaggtggtctaccggagattca

SEQ ID NO: 29838 - RNA, 97 nt, synthetic construct
  source 1..97: mol_type = other RNA
gctgaatggggtcccccgactctggctttcccccaggtctacatgttcctggtgaaatggcaggacctgtcggagaaggtggtctaccggcgtttca

SEQ ID NO: 29839 - RNA, 97 nt, synthetic construct
  source 1..97: mol_type = other RNA
gctgaatggggtcccccgactctggctttcccccaggtgtacatgttcctggtgaaatggcaggacctgtcggagaaggtggtctaccggcgattca

SEQ ID NO: 29840 - RNA, 97 nt, synthetic construct
  source 1..97: mol_type = other RNA
gctgaatggggtcccccgactctggctttcccccaggtctacatgttcctggtgaaatggcaggacctgtcggagaaggtggtctaccggcggttca

SEQ ID NO: 29841 - RNA, 97 nt, synthetic construct
  source 1..97: mol_type = other RNA
gctgaatggggtcccccgactctggctttcccccaggtttacatgttcctggtgaaatggcaggacctgtcggagaaggtggtctaccggcgcttca

SEQ ID NO: 29842 - RNA, 97 nt, synthetic construct
  source 1..97: mol_type = other RNA
gctgaatggggtcccccgactctggctttcccccaggtttacatgttcctggtgaaatggcaggacctgtcggagaaggtggtctaccggcggttca

SEQ ID NO: 29843 - RNA, 97 nt, synthetic construct
  source 1..97: mol_type = other RNA
gctgaatggggtcccccgactctggctttcccccaggtgtacatgttcctggtgaaatggcaggacctgtcggagaaggtggtctaccggcgtttca

SEQ ID NO: 29844 - RNA, 97 nt, synthetic construct
  source 1..97: mol_type = other RNA
gctgaatggggtcccccgactctggctttcccccaggtttacatgttcctggtgaaatggcaggacctgtcggagaaggtggtctaccggagattca

SEQ ID NO: 29845 - RNA, 98 nt, synthetic construct
  source 1..98: mol_type = other RNA
ggctgaatggggtcccccgactctggctttcccccaggtgtacatgttcctggtgaaatggcaggacctgtcggagaaggtggtctaccggagattca

SEQ ID NO: 29846 - RNA, 98 nt, synthetic construct
  source 1..98: mol_type = other RNA
ggctgaatggggtcccccgactctggctttcccccaggtttacatgttcctggtgaaatggcaggacctgtcggagaaggtggtctaccggcgtttca

SEQ ID NO: 29847 - RNA, 98 nt, synthetic construct
  source 1..98: mol_type = other RNA
ggctgaatggggtcccccgactctggctttcccccaggtgtacatgttcctggtgaaatggcaggacctgtcggagaaggtggtctaccggcggttca

SEQ ID NO: 29848 - RNA, 98 nt, synthetic construct
  source 1..98: mol_type = other RNA
ggctgaatggggtcccccgactctggctttcccccaggtgtacatgttcctggtgaaatggcaggacctgtcggagaaggtggtctaccggcgcttca

SEQ ID NO: 29849 - RNA, 98 nt, synthetic construct
  source 1..98: mol_type = other RNA
ggctgaatggggtcccccgactctggctttcccccaggtttacatgttcctggtgaaatggcaggacctgtcggagaaggtggtctaccggcgattca

SEQ ID NO: 29850 - RNA, 98 nt, synthetic construct
  source 1..98: mol_type = other RNA
ggctgaatggggtcccccgactctggctttcccccaggtctacatgttcctggtgaaatggcaggacctgtcggagaaggtggtctaccggcgattca

SEQ ID NO: 29851 - RNA, 98 nt, synthetic construct
  source 1..98: mol_type = other RNA
ggctgaatggggtcccccgactctggctttcccccaggtatacatgttcctggtgaaatggcaggacctgtcggagaaggtggtctaccggaggttca

SEQ ID NO: 29852 - RNA, 98 nt, synthetic construct
  source 1..98: mol_type = other RNA
ggctgaatggggtcccccgactctggctttcccccaggtatacatgttcctggtgaaatggcaggacctgtcggagaaggtggtctaccggcgattca

SEQ ID NO: 29853 - RNA, 98 nt, synthetic construct
  source 1..98: mol_type = other RNA
ggctgaatggggtcccccgactctggctttcccccaggtatacatgttcctggtgaaatggcaggacctgtcggagaaggtggtctaccggcgcttca

SEQ ID NO: 29854 - RNA, 98 nt, synthetic construct
  source 1..98: mol_type = other RNA
ggctgaatggggtcccccgactctggctttcccccaggtatacatgttcctggtgaaatggcaggacctgtcggagaaggtggtctaccggcggttca

SEQ ID NO: 29855 - RNA, 98 nt, synthetic construct
  source 1..98: mol_type = other RNA
ggctgaatggggtcccccgactctggctttcccccaggtatacatgttcctggtgaaatggcaggacctgtcggagaaggtggtctaccggcgtttca

SEQ ID NO: 29856 - RNA, 98 nt, synthetic construct
  source 1..98: mol_type = other RNA
ggctgaatggggtcccccgactctggctttcccccaggtctacatgttcctggtgaaatggcaggacctgtcggagaaggtggtctaccggagattca

SEQ ID NO: 29857 - RNA, 98 nt, synthetic construct
  source 1..98: mol_type = other RNA
ggctgaatggggtcccccgactctggctttcccccaggtctacatgttcctggtgaaatggcaggacctgtcggagaaggtggtctaccggaggttca

SEQ ID NO: 29858 - RNA, 98 nt, synthetic construct
  source 1..98: mol_type = other RNA
ggctgaatggggtcccccgactctggctttcccccaggtatacatgttcctggtgaaatggcaggacctgtcggagaaggtggtctaccggagattca

SEQ ID NO: 29859 - RNA, 98 nt, synthetic construct
  source 1..98: mol_type = other RNA
ggctgaatggggtcccccgactctggctttcccccaggtctacatgttcctggtgaaatggcaggacctgtcggagaaggtggtctaccggcgcttca

SEQ ID NO: 29860 - RNA, 98 nt, synthetic construct
  source 1..98: mol_type = other RNA
ggctgaatggggtcccccgactctggctttcccccaggtgtacatgttcctggtgaaatggcaggacctgtcggagaaggtggtctaccggaggttca

SEQ ID NO: 29861 - RNA, 98 nt, synthetic construct
  source 1..98: mol_type = other RNA
ggctgaatggggtcccccgactctggctttcccccaggtgtacatgttcctggtgaaatggcaggacctgtcggagaaggtggtctaccggcgattca

SEQ ID NO: 29862 - RNA, 98 nt, synthetic construct
  source 1..98: mol_type = other RNA
ggctgaatggggtcccccgactctggctttcccccaggtgtacatgttcctggtgaaatggcaggacctgtcggagaaggtggtctaccggcgtttca

SEQ ID NO: 29863 - RNA, 98 nt, synthetic construct
  source 1..98: mol_type = other RNA
ggctgaatggggtcccccgactctggctttcccccaggtttacatgttcctggtgaaatggcaggacctgtcggagaaggtggtctaccggcggttca

SEQ ID NO: 29864 - RNA, 98 nt, synthetic construct
  source 1..98: mol_type = other RNA
ggctgaatggggtcccccgactctggctttcccccaggtttacatgttcctggtgaaatggcaggacctgtcggagaaggtggtctaccggagattca

SEQ ID NO: 29865 - RNA, 98 nt, synthetic construct
  source 1..98: mol_type = other RNA
ggctgaatggggtcccccgactctggctttcccccaggtttacatgttcctggtgaaatggcaggacctgtcggagaaggtggtctaccggcgcttca

SEQ ID NO: 29866 - RNA, 98 nt, synthetic construct
  source 1..98: mol_type = other RNA
ggctgaatggggtcccccgactctggctttcccccaggtctacatgttcctggtgaaatggcaggacctgtcggagaaggtggtctaccggcggttca

SEQ ID NO: 29867 - RNA, 98 nt, synthetic construct
  source 1..98: mol_type = other RNA
ggctgaatggggtcccccgactctggctttcccccaggtttacatgttcctggtgaaatggcaggacctgtcggagaaggtggtctaccggaggttca

SEQ ID NO: 29868 - RNA, 98 nt, synthetic construct
  source 1..98: mol_type = other RNA
ggctgaatggggtcccccgactctggctttcccccaggtctacatgttcctggtgaaatggcaggacctgtcggagaaggtggtctaccggcgtttca

SEQ ID NO: 29869 - RNA, 99 nt, synthetic construct
  source 1..99: mol_type = other RNA
aggctgaatggggtcccccgactctggctttcccccaggtttacatgttcctggtgaaatggcaggacctgtcggagaaggtggtctaccggcgtttca

SEQ ID NO: 29870 - RNA, 99 nt, synthetic construct
  source 1..99: mol_type = other RNA
aggctgaatggggtcccccgactctggctttcccccaggtgtacatgttcctggtgaaatggcaggacctgtcggagaaggtggtctaccggcgtttca

SEQ ID NO: 29871 - RNA, 99 nt, synthetic construct
  source 1..99: mol_type = other RNA
aggctgaatggggtcccccgactctggctttcccccaggtctacatgttcctggtgaaatggcaggacctgtcggagaaggtggtctaccggaggttca

SEQ ID NO: 29872 - RNA, 99 nt, synthetic construct
  source 1..99: mol_type = other RNA
aggctgaatggggtcccccgactctggctttcccccaggtctacatgttcctggtgaaatggcaggacctgtcggagaaggtggtctaccggcggttca

SEQ ID NO: 29873 - RNA, 99 nt, synthetic construct
  source 1..99: mol_type = other RNA
aggctgaatggggtcccccgactctggctttcccccaggtttacatgttcctggtgaaatggcaggacctgtcggagaaggtggtctaccggagattca

SEQ ID NO: 29874 - RNA, 99 nt, synthetic construct
  source 1..99: mol_type = other RNA
aggctgaatggggtcccccgactctggctttcccccaggtctacatgttcctggtgaaatggcaggacctgtcggagaaggtggtctaccggagattca

SEQ ID NO: 29875 - RNA, 99 nt, synthetic construct
  source 1..99: mol_type = other RNA
aggctgaatggggtcccccgactctggctttcccccaggtctacatgttcctggtgaaatggcaggacctgtcggagaaggtggtctaccggcgattca

SEQ ID NO: 29876 - RNA, 99 nt, synthetic construct
  source 1..99: mol_type = other RNA
aggctgaatggggtcccccgactctggctttcccccaggtttacatgttcctggtgaaatggcaggacctgtcggagaaggtggtctaccggcgcttca

SEQ ID NO: 29877 - RNA, 99 nt, synthetic construct
  source 1..99: mol_type = other RNA
aggctgaatggggtcccccgactctggctttcccccaggtgtacatgttcctggtgaaatggcaggacctgtcggagaaggtggtctaccggcgcttca

SEQ ID NO: 29878 - RNA, 99 nt, synthetic construct
  source 1..99: mol_type = other RNA
aggctgaatggggtcccccgactctggctttcccccaggtctacatgttcctggtgaaatggcaggacctgtcggagaaggtggtctaccggcgtttca

SEQ ID NO: 29879 - RNA, 99 nt, synthetic construct
  source 1..99: mol_type = other RNA
aggctgaatggggtcccccgactctggctttcccccaggtttacatgttcctggtgaaatggcaggacctgtcggagaaggtggtctaccggaggttca

SEQ ID NO: 29880 - RNA, 99 nt, synthetic construct
  source 1..99: mol_type = other RNA
aggctgaatggggtcccccgactctggctttcccccaggtatacatgttcctggtgaaatggcaggacctgtcggagaaggtggtctaccggagattca

SEQ ID NO: 29881 - RNA, 99 nt, synthetic construct
  source 1..99: mol_type = other RNA
aggctgaatggggtcccccgactctggctttcccccaggtatacatgttcctggtgaaatggcaggacctgtcggagaaggtggtctaccggaggttca

SEQ ID NO: 29882 - RNA, 99 nt, synthetic construct
  source 1..99: mol_type = other RNA
aggctgaatggggtcccccgactctggctttcccccaggtatacatgttcctggtgaaatggcaggacctgtcggagaaggtggtctaccggcgattca

SEQ ID NO: 29883 - RNA, 99 nt, synthetic construct
  source 1..99: mol_type = other RNA
aggctgaatggggtcccccgactctggctttcccccaggtatacatgttcctggtgaaatggcaggacctgtcggagaaggtggtctaccggcgcttca

SEQ ID NO: 29884 - RNA, 99 nt, synthetic construct
  source 1..99: mol_type = other RNA
aggctgaatggggtcccccgactctggctttcccccaggtatacatgttcctggtgaaatggcaggacctgtcggagaaggtggtctaccggcggttca

SEQ ID NO: 29885 - RNA, 99 nt, synthetic construct
  source 1..99: mol_type = other RNA
aggctgaatggggtcccccgactctggctttcccccaggtgtacatgttcctggtgaaatggcaggacctgtcggagaaggtggtctaccggagattca

SEQ ID NO: 29886 - RNA, 99 nt, synthetic construct
  source 1..99: mol_type = other RNA
aggctgaatggggtcccccgactctggctttcccccaggtgtacatgttcctggtgaaatggcaggacctgtcggagaaggtggtctaccggaggttca

SEQ ID NO: 29887 - RNA, 99 nt, synthetic construct
  source 1..99: mol_type = other RNA
aggctgaatggggtcccccgactctggctttcccccaggtgtacatgttcctggtgaaatggcaggacctgtcggagaaggtggtctaccggcgattca

SEQ ID NO: 29888 - RNA, 99 nt, synthetic construct
  source 1..99: mol_type = other RNA
aggctgaatggggtcccccgactctggctttcccccaggtttacatgttcctggtgaaatggcaggacctgtcggagaaggtggtctaccggcggttca

SEQ ID NO: 29889 - RNA, 99 nt, synthetic construct
  source 1..99: mol_type = other RNA
aggctgaatggggtcccccgactctggctttcccccaggtctacatgttcctggtgaaatggcaggacctgtcggagaaggtggtctaccggcgcttca

SEQ ID NO: 29890 - RNA, 99 nt, synthetic construct
  source 1..99: mol_type = other RNA
aggctgaatggggtcccccgactctggctttcccccaggtatacatgttcctggtgaaatggcaggacctgtcggagaaggtggtctaccggcgtttca

SEQ ID NO: 29891 - RNA, 99 nt, synthetic construct
  source 1..99: mol_type = other RNA
aggctgaatggggtcccccgactctggctttcccccaggtgtacatgttcctggtgaaatggcaggacctgtcggagaaggtggtctaccggcggttca

SEQ ID NO: 29892 - RNA, 99 nt, synthetic construct
  source 1..99: mol_type = other RNA
aggctgaatggggtcccccgactctggctttcccccaggtttacatgttcctggtgaaatggcaggacctgtcggagaaggtggtctaccggcgattca

SEQ ID NO: 29893 - RNA, 100 nt, synthetic construct
  source 1..100: mol_type = other RNA
gaggctgaatggggtcccccgactctggctttcccccaggtttacatgttcctggtgaaatggcaggacctgtcggagaaggtggtctaccggcgtttca

SEQ ID NO: 29894 - RNA, 100 nt, synthetic construct
  source 1..100: mol_type = other RNA
gaggctgaatggggtcccccgactctggctttcccccaggtctacatgttcctggtgaaatggcaggacctgtcggagaaggtggtctaccggcgattca

SEQ ID NO: 29895 - RNA, 100 nt, synthetic construct
  source 1..100: mol_type = other RNA
gaggctgaatggggtcccccgactctggctttcccccaggtctacatgttcctggtgaaatggcaggacctgtcggagaaggtggtctaccggaggttca

SEQ ID NO: 29896 - RNA, 100 nt, synthetic construct
  source 1..100: mol_type = other RNA
gaggctgaatggggtcccccgactctggctttcccccaggtctacatgttcctggtgaaatggcaggacctgtcggagaaggtggtctaccggagattca

SEQ ID NO: 29897 - RNA, 100 nt, synthetic construct
  source 1..100: mol_type = other RNA
gaggctgaatggggtcccccgactctggctttcccccaggtatacatgttcctggtgaaatggcaggacctgtcggagaaggtggtctaccggcgtttca

SEQ ID NO: 29898 - RNA, 100 nt, synthetic construct
  source 1..100: mol_type = other RNA
gaggctgaatggggtcccccgactctggctttcccccaggtatacatgttcctggtgaaatggcaggacctgtcggagaaggtggtctaccggcggttca

SEQ ID NO: 29899 - RNA, 100 nt, synthetic construct
  source 1..100: mol_type = other RNA
gaggctgaatggggtcccccgactctggctttcccccaggtatacatgttcctggtgaaatggcaggacctgtcggagaaggtggtctaccggcgcttca

SEQ ID NO: 29900 - RNA, 100 nt, synthetic construct
  source 1..100: mol_type = other RNA
gaggctgaatggggtcccccgactctggctttcccccaggtatacatgttcctggtgaaatggcaggacctgtcggagaaggtggtctaccggcgattca

SEQ ID NO: 29901 - RNA, 100 nt, synthetic construct
  source 1..100: mol_type = other RNA
gaggctgaatggggtcccccgactctggctttcccccaggtatacatgttcctggtgaaatggcaggacctgtcggagaaggtggtctaccggaggttca

SEQ ID NO: 29902 - RNA, 100 nt, synthetic construct
  source 1..100: mol_type = other RNA
gaggctgaatggggtcccccgactctggctttcccccaggtttacatgttcctggtgaaatggcaggacctgtcggagaaggtggtctaccggcgcttca

SEQ ID NO: 29903 - RNA, 100 nt, synthetic construct
  source 1..100: mol_type = other RNA
gaggctgaatggggtcccccgactctggctttcccccaggtttacatgttcctggtgaaatggcaggacctgtcggagaaggtggtctaccggcggttca

SEQ ID NO: 29904 - RNA, 100 nt, synthetic construct
  source 1..100: mol_type = other RNA
gaggctgaatggggtcccccgactctggctttcccccaggtatacatgttcctggtgaaatggcaggacctgtcggagaaggtggtctaccggagattca

SEQ ID NO: 29905 - RNA, 100 nt, synthetic construct
  source 1..100: mol_type = other RNA
gaggctgaatggggtcccccgactctggctttcccccaggtgtacatgttcctggtgaaatggcaggacctgtcggagaaggtggtctaccggaggttca

SEQ ID NO: 29906 - RNA, 100 nt, synthetic construct
  source 1..100: mol_type = other RNA
gaggctgaatggggtcccccgactctggctttcccccaggtgtacatgttcctggtgaaatggcaggacctgtcggagaaggtggtctaccggcgattca

SEQ ID NO: 29907 - RNA, 100 nt, synthetic construct
  source 1..100: mol_type = other RNA
gaggctgaatggggtcccccgactctggctttcccccaggtgtacatgttcctggtgaaatggcaggacctgtcggagaaggtggtctaccggcgcttca

SEQ ID NO: 29908 - RNA, 100 nt, synthetic construct
  source 1..100: mol_type = other RNA
gaggctgaatggggtcccccgactctggctttcccccaggtgtacatgttcctggtgaaatggcaggacctgtcggagaaggtggtctaccggcggttca

SEQ ID NO: 29909 - RNA, 100 nt, synthetic construct
  source 1..100: mol_type = other RNA
gaggctgaatggggtcccccgactctggctttcccccaggtttacatgttcctggtgaaatggcaggacctgtcggagaaggtggtctaccggaggttca

SEQ ID NO: 29910 - RNA, 100 nt, synthetic construct
  source 1..100: mol_type = other RNA
gaggctgaatggggtcccccgactctggctttcccccaggtttacatgttcctggtgaaatggcaggacctgtcggagaaggtggtctaccggcgattca

SEQ ID NO: 29911 - RNA, 100 nt, synthetic construct
  source 1..100: mol_type = other RNA
gaggctgaatggggtcccccgactctggctttcccccaggtttacatgttcctggtgaaatggcaggacctgtcggagaaggtggtctaccggagattca

SEQ ID NO: 29912 - RNA, 100 nt, synthetic construct
  source 1..100: mol_type = other RNA
gaggctgaatggggtcccccgactctggctttcccccaggtgtacatgttcctggtgaaatggcaggacctgtcggagaaggtggtctaccggagattca

SEQ ID NO: 29913 - RNA, 100 nt, synthetic construct
  source 1..100: mol_type = other RNA
gaggctgaatggggtcccccgactctggctttcccccaggtctacatgttcctggtgaaatggcaggacctgtcggagaaggtggtctaccggcggttca

SEQ ID NO: 29914 - RNA, 100 nt, synthetic construct
  source 1..100: mol_type = other RNA
gaggctgaatggggtcccccgactctggctttcccccaggtctacatgttcctggtgaaatggcaggacctgtcggagaaggtggtctaccggcgcttca

SEQ ID NO: 29915 - RNA, 100 nt, synthetic construct
  source 1..100: mol_type = other RNA
gaggctgaatggggtcccccgactctggctttcccccaggtgtacatgttcctggtgaaatggcaggacctgtcggagaaggtggtctaccggcgtttca

SEQ ID NO: 29916 - RNA, 100 nt, synthetic construct
  source 1..100: mol_type = other RNA
gaggctgaatggggtcccccgactctggctttcccccaggtctacatgttcctggtgaaatggcaggacctgtcggagaaggtggtctaccggcgtttca

SEQ ID NO: 29917 - RNA, 101 nt, synthetic construct
  source 1..101: mol_type = other RNA
ggaggctgaatggggtcccccgactctggctttcccccaggtttacatgttcctggtgaaatggcaggacctgtcggagaaggtggtctaccggcgtttca

SEQ ID NO: 29918 - RNA, 101 nt, synthetic construct
  source 1..101: mol_type = other RNA
ggaggctgaatggggtcccccgactctggctttcccccaggtttacatgttcctggtgaaatggcaggacctgtcggagaaggtggtctaccggcgattca

SEQ ID NO: 29919 - RNA, 101 nt, synthetic construct
  source 1..101: mol_type = other RNA
ggaggctgaatggggtcccccgactctggctttcccccaggtttacatgttcctggtgaaatggcaggacctgtcggagaaggtggtctaccggcgcttca

SEQ ID NO: 29920 - RNA, 101 nt, synthetic construct
  source 1..101: mol_type = other RNA
ggaggctgaatggggtcccccgactctggctttcccccaggtttacatgttcctggtgaaatggcaggacctgtcggagaaggtggtctaccggcggttca

SEQ ID NO: 29921 - RNA, 101 nt, synthetic construct
  source 1..101: mol_type = other RNA
ggaggctgaatggggtcccccgactctggctttcccccaggtgtacatgttcctggtgaaatggcaggacctgtcggagaaggtggtctaccggaggttca

SEQ ID NO: 29922 - RNA, 101 nt, synthetic construct
  source 1..101: mol_type = other RNA
ggaggctgaatggggtcccccgactctggctttcccccaggtttacatgttcctggtgaaatggcaggacctgtcggagaaggtggtctaccggaggttca

SEQ ID NO: 29923 - RNA, 101 nt, synthetic construct
  source 1..101: mol_type = other RNA
ggaggctgaatggggtcccccgactctggctttcccccaggtgtacatgttcctggtgaaatggcaggacctgtcggagaaggtggtctaccggagattca

SEQ ID NO: 29924 - RNA, 101 nt, synthetic construct
  source 1..101: mol_type = other RNA
ggaggctgaatggggtcccccgactctggctttcccccaggtctacatgttcctggtgaaatggcaggacctgtcggagaaggtggtctaccggcgattca

SEQ ID NO: 29925 - RNA, 101 nt, synthetic construct
  source 1..101: mol_type = other RNA
ggaggctgaatggggtcccccgactctggctttcccccaggtctacatgttcctggtgaaatggcaggacctgtcggagaaggtggtctaccggcggttca

SEQ ID NO: 29926 - RNA, 101 nt, synthetic construct
  source 1..101: mol_type = other RNA
ggaggctgaatggggtcccccgactctggctttcccccaggtgtacatgttcctggtgaaatggcaggacctgtcggagaaggtggtctaccggcgattca

SEQ ID NO: 29927 - RNA, 101 nt, synthetic construct
  source 1..101: mol_type = other RNA
ggaggctgaatggggtcccccgactctggctttcccccaggtgtacatgttcctggtgaaatggcaggacctgtcggagaaggtggtctaccggcgcttca

SEQ ID NO: 29928 - RNA, 101 nt, synthetic construct
  source 1..101: mol_type = other RNA
ggaggctgaatggggtcccccgactctggctttcccccaggtctacatgttcctggtgaaatggcaggacctgtcggagaaggtggtctaccggcgtttca

SEQ ID NO: 29929 - RNA, 101 nt, synthetic construct
  source 1..101: mol_type = other RNA
ggaggctgaatggggtcccccgactctggctttcccccaggtatacatgttcctggtgaaatggcaggacctgtcggagaaggtggtctaccggaggttca

SEQ ID NO: 29930 - RNA, 101 nt, synthetic construct
  source 1..101: mol_type = other RNA
ggaggctgaatggggtcccccgactctggctttcccccaggtgtacatgttcctggtgaaatggcaggacctgtcggagaaggtggtctaccggcgtttca

SEQ ID NO: 29931 - RNA, 101 nt, synthetic construct
  source 1..101: mol_type = other RNA
ggaggctgaatggggtcccccgactctggctttcccccaggtatacatgttcctggtgaaatggcaggacctgtcggagaaggtggtctaccggcgcttca

SEQ ID NO: 29932 - RNA, 101 nt, synthetic construct
  source 1..101: mol_type = other RNA
ggaggctgaatggggtcccccgactctggctttcccccaggtatacatgttcctggtgaaatggcaggacctgtcggagaaggtggtctaccggcggttca

SEQ ID NO: 29933 - RNA, 101 nt, synthetic construct
  source 1..101: mol_type = other RNA
ggaggctgaatggggtcccccgactctggctttcccccaggtatacatgttcctggtgaaatggcaggacctgtcggagaaggtggtctaccggcgattca

SEQ ID NO: 29934 - RNA, 101 nt, synthetic construct
  source 1..101: mol_type = other RNA
ggaggctgaatggggtcccccgactctggctttcccccaggtctacatgttcctggtgaaatggcaggacctgtcggagaaggtggtctaccggagattca

SEQ ID NO: 29935 - RNA, 101 nt, synthetic construct
  source 1..101: mol_type = other RNA
ggaggctgaatggggtcccccgactctggctttcccccaggtctacatgttcctggtgaaatggcaggacctgtcggagaaggtggtctaccggaggttca

SEQ ID NO: 29936 - RNA, 101 nt, synthetic construct
  source 1..101: mol_type = other RNA
ggaggctgaatggggtcccccgactctggctttcccccaggtctacatgttcctggtgaaatggcaggacctgtcggagaaggtggtctaccggcgcttca

SEQ ID NO: 29937 - RNA, 101 nt, synthetic construct
  source 1..101: mol_type = other RNA
ggaggctgaatggggtcccccgactctggctttcccccaggtatacatgttcctggtgaaatggcaggacctgtcggagaaggtggtctaccggcgtttca

SEQ ID NO: 29938 - RNA, 101 nt, synthetic construct
  source 1..101: mol_type = other RNA
ggaggctgaatggggtcccccgactctggctttcccccaggtgtacatgttcctggtgaaatggcaggacctgtcggagaaggtggtctaccggcggttca

SEQ ID NO: 29939 - RNA, 101 nt, synthetic construct
  source 1..101: mol_type = other RNA
ggaggctgaatggggtcccccgactctggctttcccccaggtttacatgttcctggtgaaatggcaggacctgtcggagaaggtggtctaccggagattca

SEQ ID NO: 29940 - RNA, 101 nt, synthetic construct
  source 1..101: mol_type = other RNA
ggaggctgaatggggtcccccgactctggctttcccccaggtatacatgttcctggtgaaatggcaggacctgtcggagaaggtggtctaccggagattca

SEQ ID NO: 29941 - RNA, 102 nt, synthetic construct
  source 1..102: mol_type = other RNA
tggaggctgaatggggtcccccgactctggctttcccccaggtgtacatgttcctggtgaaatggcaggacctgtcggagaaggtggtctaccggcgtttca

SEQ ID NO: 29942 - RNA, 102 nt, synthetic construct
  source 1..102: mol_type = other RNA
tggaggctgaatggggtcccccgactctggctttcccccaggtttacatgttcctggtgaaatggcaggacctgtcggagaaggtggtctaccggagattca

SEQ ID NO: 29943 - RNA, 102 nt, synthetic construct
  source 1..102: mol_type = other RNA
tggaggctgaatggggtcccccgactctggctttcccccaggtttacatgttcctggtgaaatggcaggacctgtcggagaaggtggtctaccggaggttca

SEQ ID NO: 29944 - RNA, 102 nt, synthetic construct
  source 1..102: mol_type = other RNA
tggaggctgaatggggtcccccgactctggctttcccccaggtttacatgttcctggtgaaatggcaggacctgtcggagaaggtggtctaccggcgattca

SEQ ID NO: 29945 - RNA, 102 nt, synthetic construct
  source 1..102: mol_type = other RNA
tggaggctgaatggggtcccccgactctggctttcccccaggtttacatgttcctggtgaaatggcaggacctgtcggagaaggtggtctaccggcgcttca

SEQ ID NO: 29946 - RNA, 102 nt, synthetic construct
  source 1..102: mol_type = other RNA
tggaggctgaatggggtcccccgactctggctttcccccaggtgtacatgttcctggtgaaatggcaggacctgtcggagaaggtggtctaccggcggttca

SEQ ID NO: 29947 - RNA, 102 nt, synthetic construct
  source 1..102: mol_type = other RNA
tggaggctgaatggggtcccccgactctggctttcccccaggtgtacatgttcctggtgaaatggcaggacctgtcggagaaggtggtctaccggagattca

SEQ ID NO: 29948 - RNA, 102 nt, synthetic construct
  source 1..102: mol_type = other RNA
tggaggctgaatggggtcccccgactctggctttcccccaggtatacatgttcctggtgaaatggcaggacctgtcggagaaggtggtctaccggcggttca

SEQ ID NO: 29949 - RNA, 102 nt, synthetic construct
  source 1..102: mol_type = other RNA
tggaggctgaatggggtcccccgactctggctttcccccaggtgtacatgttcctggtgaaatggcaggacctgtcggagaaggtggtctaccggcgcttca

SEQ ID NO: 29950 - RNA, 102 nt, synthetic construct
  source 1..102: mol_type = other RNA
tggaggctgaatggggtcccccgactctggctttcccccaggtctacatgttcctggtgaaatggcaggacctgtcggagaaggtggtctaccggcgcttca

SEQ ID NO: 29951 - RNA, 102 nt, synthetic construct
  source 1..102: mol_type = other RNA
tggaggctgaatggggtcccccgactctggctttcccccaggtgtacatgttcctggtgaaatggcaggacctgtcggagaaggtggtctaccggaggttca

SEQ ID NO: 29952 - RNA, 102 nt, synthetic construct
  source 1..102: mol_type = other RNA
tggaggctgaatggggtcccccgactctggctttcccccaggtctacatgttcctggtgaaatggcaggacctgtcggagaaggtggtctaccggcgtttca

SEQ ID NO: 29953 - RNA, 102 nt, synthetic construct
  source 1..102: mol_type = other RNA
tggaggctgaatggggtcccccgactctggctttcccccaggtatacatgttcctggtgaaatggcaggacctgtcggagaaggtggtctaccggcgattca

SEQ ID NO: 29954 - RNA, 102 nt, synthetic construct
  source 1..102: mol_type = other RNA
tggaggctgaatggggtcccccgactctggctttcccccaggtctacatgttcctggtgaaatggcaggacctgtcggagaaggtggtctaccggcggttca

SEQ ID NO: 29955 - RNA, 102 nt, synthetic construct
  source 1..102: mol_type = other RNA
tggaggctgaatggggtcccccgactctggctttcccccaggtctacatgttcctggtgaaatggcaggacctgtcggagaaggtggtctaccggcgattca

SEQ ID NO: 29956 - RNA, 102 nt, synthetic construct
  source 1..102: mol_type = other RNA
tggaggctgaatggggtcccccgactctggctttcccccaggtttacatgttcctggtgaaatggcaggacctgtcggagaaggtggtctaccggcggttca

SEQ ID NO: 29957 - RNA, 102 nt, synthetic construct
  source 1..102: mol_type = other RNA
tggaggctgaatggggtcccccgactctggctttcccccaggtgtacatgttcctggtgaaatggcaggacctgtcggagaaggtggtctaccggcgattca

SEQ ID NO: 29958 - RNA, 102 nt, synthetic construct
  source 1..102: mol_type = other RNA
tggaggctgaatggggtcccccgactctggctttcccccaggtttacatgttcctggtgaaatggcaggacctgtcggagaaggtggtctaccggcgtttca

SEQ ID NO: 29959 - RNA, 102 nt, synthetic construct
  source 1..102: mol_type = other RNA
tggaggctgaatggggtcccccgactctggctttcccccaggtatacatgttcctggtgaaatggcaggacctgtcggagaaggtggtctaccggagattca

SEQ ID NO: 29960 - RNA, 102 nt, synthetic construct
  source 1..102: mol_type = other RNA
tggaggctgaatggggtcccccgactctggctttcccccaggtatacatgttcctggtgaaatggcaggacctgtcggagaaggtggtctaccggcgtttca

SEQ ID NO: 29961 - RNA, 102 nt, synthetic construct
  source 1..102: mol_type = other RNA
tggaggctgaatggggtcccccgactctggctttcccccaggtatacatgttcctggtgaaatggcaggacctgtcggagaaggtggtctaccggaggttca

SEQ ID NO: 29962 - RNA, 102 nt, synthetic construct
  source 1..102: mol_type = other RNA
tggaggctgaatggggtcccccgactctggctttcccccaggtatacatgttcctggtgaaatggcaggacctgtcggagaaggtggtctaccggcgcttca

SEQ ID NO: 29963 - RNA, 102 nt, synthetic construct
  source 1..102: mol_type = other RNA
tggaggctgaatggggtcccccgactctggctttcccccaggtctacatgttcctggtgaaatggcaggacctgtcggagaaggtggtctaccggaggttca

SEQ ID NO: 29964 - RNA, 102 nt, synthetic construct
  source 1..102: mol_type = other RNA
tggaggctgaatggggtcccccgactctggctttcccccaggtctacatgttcctggtgaaatggcaggacctgtcggagaaggtggtctaccggagattca

SEQ ID NO: 29965 - RNA, 103 nt, synthetic construct
  source 1..103: mol_type = other RNA
ttggaggctgaatggggtcccccgactctggctttcccccaggtctacatgttcctggtgaaatggcaggacctgtcggagaaggtggtctaccggcgtttca

SEQ ID NO: 29966 - RNA, 103 nt, synthetic construct
  source 1..103: mol_type = other RNA
ttggaggctgaatggggtcccccgactctggctttcccccaggtttacatgttcctggtgaaatggcaggacctgtcggagaaggtggtctaccggcgtttca

SEQ ID NO: 29967 - RNA, 103 nt, synthetic construct
  source 1..103: mol_type = other RNA
ttggaggctgaatggggtcccccgactctggctttcccccaggtctacatgttcctggtgaaatggcaggacctgtcggagaaggtggtctaccggcgcttca

SEQ ID NO: 29968 - RNA, 103 nt, synthetic construct
  source 1..103: mol_type = other RNA
ttggaggctgaatggggtcccccgactctggctttcccccaggtctacatgttcctggtgaaatggcaggacctgtcggagaaggtggtctaccggaggttca

SEQ ID NO: 29969 - RNA, 103 nt, synthetic construct
  source 1..103: mol_type = other RNA
ttggaggctgaatggggtcccccgactctggctttcccccaggtctacatgttcctggtgaaatggcaggacctgtcggagaaggtggtctaccggagattca

SEQ ID NO: 29970 - RNA, 103 nt, synthetic construct
  source 1..103: mol_type = other RNA
ttggaggctgaatggggtcccccgactctggctttcccccaggtatacatgttcctggtgaaatggcaggacctgtcggagaaggtggtctaccggcgtttca

SEQ ID NO: 29971 - RNA, 103 nt, synthetic construct
  source 1..103: mol_type = other RNA
ttggaggctgaatggggtcccccgactctggctttcccccaggtatacatgttcctggtgaaatggcaggacctgtcggagaaggtggtctaccggcggttca

SEQ ID NO: 29972 - RNA, 103 nt, synthetic construct
  source 1..103: mol_type = other RNA
ttggaggctgaatggggtcccccgactctggctttcccccaggtatacatgttcctggtgaaatggcaggacctgtcggagaaggtggtctaccggcgattca

SEQ ID NO: 29973 - RNA, 103 nt, synthetic construct
  source 1..103: mol_type = other RNA
ttggaggctgaatggggtcccccgactctggctttcccccaggtatacatgttcctggtgaaatggcaggacctgtcggagaaggtggtctaccggaggttca

SEQ ID NO: 29974 - RNA, 103 nt, synthetic construct
  source 1..103: mol_type = other RNA
ttggaggctgaatggggtcccccgactctggctttcccccaggtatacatgttcctggtgaaatggcaggacctgtcggagaaggtggtctaccggagattca

SEQ ID NO: 29975 - RNA, 103 nt, synthetic construct
  source 1..103: mol_type = other RNA
ttggaggctgaatggggtcccccgactctggctttcccccaggtgtacatgttcctggtgaaatggcaggacctgtcggagaaggtggtctaccggcgcttca

SEQ ID NO: 29976 - RNA, 103 nt, synthetic construct
  source 1..103: mol_type = other RNA
ttggaggctgaatggggtcccccgactctggctttcccccaggtgtacatgttcctggtgaaatggcaggacctgtcggagaaggtggtctaccggagattca

SEQ ID NO: 29977 - RNA, 103 nt, synthetic construct
  source 1..103: mol_type = other RNA
ttggaggctgaatggggtcccccgactctggctttcccccaggtgtacatgttcctggtgaaatggcaggacctgtcggagaaggtggtctaccggcgattca

SEQ ID NO: 29978 - RNA, 103 nt, synthetic construct
  source 1..103: mol_type = other RNA
ttggaggctgaatggggtcccccgactctggctttcccccaggtctacatgttcctggtgaaatggcaggacctgtcggagaaggtggtctaccggcggttca

SEQ ID NO: 29979 - RNA, 103 nt, synthetic construct
  source 1..103: mol_type = other RNA
ttggaggctgaatggggtcccccgactctggctttcccccaggtgtacatgttcctggtgaaatggcaggacctgtcggagaaggtggtctaccggcggttca

SEQ ID NO: 29980 - RNA, 103 nt, synthetic construct
  source 1..103: mol_type = other RNA
ttggaggctgaatggggtcccccgactctggctttcccccaggtgtacatgttcctggtgaaatggcaggacctgtcggagaaggtggtctaccggcgtttca

SEQ ID NO: 29981 - RNA, 103 nt, synthetic construct
  source 1..103: mol_type = other RNA
ttggaggctgaatggggtcccccgactctggctttcccccaggtttacatgttcctggtgaaatggcaggacctgtcggagaaggtggtctaccggagattca

SEQ ID NO: 29982 - RNA, 103 nt, synthetic construct
  source 1..103: mol_type = other RNA
ttggaggctgaatggggtcccccgactctggctttcccccaggtttacatgttcctggtgaaatggcaggacctgtcggagaaggtggtctaccggaggttca

SEQ ID NO: 29983 - RNA, 103 nt, synthetic construct
  source 1..103: mol_type = other RNA
ttggaggctgaatggggtcccccgactctggctttcccccaggtttacatgttcctggtgaaatggcaggacctgtcggagaaggtggtctaccggcgattca

SEQ ID NO: 29984 - RNA, 103 nt, synthetic construct
  source 1..103: mol_type = other RNA
ttggaggctgaatggggtcccccgactctggctttcccccaggtttacatgttcctggtgaaatggcaggacctgtcggagaaggtggtctaccggcgcttca

SEQ ID NO: 29985 - RNA, 103 nt, synthetic construct
  source 1..103: mol_type = other RNA
ttggaggctgaatggggtcccccgactctggctttcccccaggtttacatgttcctggtgaaatggcaggacctgtcggagaaggtggtctaccggcggttca

SEQ ID NO: 29986 - RNA, 103 nt, synthetic construct
  source 1..103: mol_type = other RNA
ttggaggctgaatggggtcccccgactctggctttcccccaggtatacatgttcctggtgaaatggcaggacctgtcggagaaggtggtctaccggcgcttca

SEQ ID NO: 29987 - RNA, 103 nt, synthetic construct
  source 1..103: mol_type = other RNA
ttggaggctgaatggggtcccccgactctggctttcccccaggtgtacatgttcctggtgaaatggcaggacctgtcggagaaggtggtctaccggaggttca

SEQ ID NO: 29988 - RNA, 103 nt, synthetic construct
  source 1..103: mol_type = other RNA
ttggaggctgaatggggtcccccgactctggctttcccccaggtctacatgttcctggtgaaatggcaggacctgtcggagaaggtggtctaccggcgattca

SEQ ID NO: 29989 - RNA, 20 nt, synthetic construct
  source 1..20: mol_type = other RNA
gtggtctaccggcggttcac

SEQ ID NO: 29990 - RNA, 20 nt, synthetic construct
  source 1..20: mol_type = other RNA
gtggtctaccggcgattcac

SEQ ID NO: 29991 - RNA, 20 nt, synthetic construct
  source 1..20: mol_type = other RNA
gtggtctaccggcgtttcac

SEQ ID NO: 29992 - RNA, 20 nt, synthetic construct
  source 1..20: mol_type = other RNA
ggtctaccggcgtttcaccg

SEQ ID NO: 29993 - RNA, 20 nt, synthetic construct
  source 1..20: mol_type = other RNA
ggtctaccggcggttcaccg

SEQ ID NO: 29994 - RNA, 20 nt, synthetic construct
  source 1..20: mol_type = other RNA
ggtctaccggcgattcaccg

SEQ ID NO: 29995 - RNA, 20 nt, synthetic construct
  source 1..20: mol_type = other RNA
ggtctaccggaggttcaccg

SEQ ID NO: 29996 - RNA, 20 nt, synthetic construct
  source 1..20: mol_type = other RNA
ggtctaccggagattcaccg

SEQ ID NO: 29997 - RNA, 16 nt, synthetic construct
  source 1..16: mol_type = other RNA
tcggtgaagcgccggt

SEQ ID NO: 29998 - RNA, 17 nt, synthetic construct
  source 1..17: mol_type = other RNA
ctcggtgaagcgccggt

SEQ ID NO: 29999 - RNA, 18 nt, synthetic construct
  source 1..18: mol_type = other RNA
tctcggtgaagcgccggt

SEQ ID NO: 30000 - RNA, 19 nt, synthetic construct
  source 1..19: mol_type = other RNA
atctcggtgaagcgccggt

SEQ ID NO: 30001 - RNA, 20 nt, synthetic construct
  source 1..20: mol_type = other RNA
gatctcggtgaagcgccggt

SEQ ID NO: 30002 - RNA, 21 nt, synthetic construct
  source 1..21: mol_type = other RNA
agatctcggtgaagcgccggt

SEQ ID NO: 30003 - RNA, 22 nt, synthetic construct
  source 1..22: mol_type = other RNA
tagatctcggtgaagcgccggt

SEQ ID NO: 30004-30009 - skipped (6 entries)

SEQ ID NO: 30010 - RNA, 10 nt, synthetic construct
  source 1..10: mol_type = other RNA
ggcgcttcac

SEQ ID NO: 30011 - RNA, 11 nt, synthetic construct
  source 1..11: mol_type = other RNA
ggcgcttcacc

SEQ ID NO: 30012 - RNA, 12 nt, synthetic construct
  source 1..12: mol_type = other RNA
ggcgcttcaccg

SEQ ID NO: 30013 - RNA, 13 nt, synthetic construct
  source 1..13: mol_type = other RNA
ggcgcttcaccga

SEQ ID NO: 30014 - RNA, 14 nt, synthetic construct
  source 1..14: mol_type = other RNA
ggcgcttcaccgag

SEQ ID NO: 30015 - RNA, 15 nt, synthetic construct
  source 1..15: mol_type = other RNA
ggcgcttcaccgaga

SEQ ID NO: 30016 - RNA, 16 nt, synthetic construct
  source 1..16: mol_type = other RNA
ggcgcttcaccgagat

SEQ ID NO: 30017 - RNA, 17 nt, synthetic construct
  source 1..17: mol_type = other RNA
ggcgcttcaccgagatc

SEQ ID NO: 30018 - RNA, 18 nt, synthetic construct
  source 1..18: mol_type = other RNA
ggcgcttcaccgagatct

SEQ ID NO: 30019 - RNA, 19 nt, synthetic construct
  source 1..19: mol_type = other RNA
ggcgcttcaccgagatcta

SEQ ID NO: 30020 - RNA, 52 nt, synthetic construct
  source 1..52: mol_type = other RNA
gtgtacatgttcctggtgaaatggcaggacctgtcggagaaggtggtatacc

SEQ ID NO: 30021 - RNA, 52 nt, synthetic construct
  source 1..52: mol_type = other RNA
gtgtacatgttcctggtgaaatggcaggacctgtcggagaaggtggtgtacc

SEQ ID NO: 30022 - RNA, 52 nt, synthetic construct
  source 1..52: mol_type = other RNA
gtatacatgttcctggtgaaatggcaggacctgtcggagaaggtggtttacc

SEQ ID NO: 30023 - RNA, 52 nt, synthetic construct
  source 1..52: mol_type = other RNA
gtctacatgttcctggtgaaatggcaggacctgtcggagaaggtggtctacc

SEQ ID NO: 30024 - RNA, 52 nt, synthetic construct
  source 1..52: mol_type = other RNA
gtctacatgttcctggtgaaatggcaggacctgtcggagaaggtggtgtacc

SEQ ID NO: 30025 - RNA, 52 nt, synthetic construct
  source 1..52: mol_type = other RNA
gtgtacatgttcctggtgaaatggcaggacctgtcggagaaggtggtttacc

SEQ ID NO: 30026 - RNA, 52 nt, synthetic construct
  source 1..52: mol_type = other RNA
gtatacatgttcctggtgaaatggcaggacctgtcggagaaggtggtctacc

SEQ ID NO: 30027 - RNA, 52 nt, synthetic construct
  source 1..52: mol_type = other RNA
gtgtacatgttcctggtgaaatggcaggacctgtcggagaaggtggtctacc

SEQ ID NO: 30028 - RNA, 52 nt, synthetic construct
  source 1..52: mol_type = other RNA
gtttacatgttcctggtgaaatggcaggacctgtcggagaaggtggtctacc

SEQ ID NO: 30029 - RNA, 52 nt, synthetic construct
  source 1..52: mol_type = other RNA
gtttacatgttcctggtgaaatggcaggacctgtcggagaaggtggtttacc

SEQ ID NO: 30030 - RNA, 52 nt, synthetic construct
  source 1..52: mol_type = other RNA
gtctacatgttcctggtgaaatggcaggacctgtcggagaaggtggtttacc

SEQ ID NO: 30031 - RNA, 52 nt, synthetic construct
  source 1..52: mol_type = other RNA
gtatacatgttcctggtgaaatggcaggacctgtcggagaaggtggtgtacc

SEQ ID NO: 30032 - RNA, 52 nt, synthetic construct
  source 1..52: mol_type = other RNA
gtatacatgttcctggtgaaatggcaggacctgtcggagaaggtggtatacc

SEQ ID NO: 30033 - RNA, 52 nt, synthetic construct
  source 1..52: mol_type = other RNA
gtttacatgttcctggtgaaatggcaggacctgtcggagaaggtggtgtacc

SEQ ID NO: 30034 - RNA, 52 nt, synthetic construct
  source 1..52: mol_type = other RNA
gtttacatgttcctggtgaaatggcaggacctgtcggagaaggtggtatacc

SEQ ID NO: 30035 - RNA, 52 nt, synthetic construct
  source 1..52: mol_type = other RNA
gtctacatgttcctggtgaaatggcaggacctgtcggagaaggtggtatacc

SEQ ID NO: 30036 - RNA, 53 nt, synthetic construct
  source 1..53: mol_type = other RNA
ggtctacatgttcctggtgaaatggcaggacctgtcggagaaggtggtgtacc

SEQ ID NO: 30037 - RNA, 53 nt, synthetic construct
  source 1..53: mol_type = other RNA
ggtctacatgttcctggtgaaatggcaggacctgtcggagaaggtggtctacc

SEQ ID NO: 30038 - RNA, 53 nt, synthetic construct
  source 1..53: mol_type = other RNA
ggtctacatgttcctggtgaaatggcaggacctgtcggagaaggtggtatacc

SEQ ID NO: 30039 - RNA, 53 nt, synthetic construct
  source 1..53: mol_type = other RNA
ggtttacatgttcctggtgaaatggcaggacctgtcggagaaggtggtatacc

SEQ ID NO: 30040 - RNA, 53 nt, synthetic construct
  source 1..53: mol_type = other RNA
ggtatacatgttcctggtgaaatggcaggacctgtcggagaaggtggtttacc

SEQ ID NO: 30041 - RNA, 53 nt, synthetic construct
  source 1..53: mol_type = other RNA
ggtatacatgttcctggtgaaatggcaggacctgtcggagaaggtggtctacc

SEQ ID NO: 30042 - RNA, 53 nt, synthetic construct
  source 1..53: mol_type = other RNA
ggtatacatgttcctggtgaaatggcaggacctgtcggagaaggtggtatacc

SEQ ID NO: 30043 - RNA, 53 nt, synthetic construct
  source 1..53: mol_type = other RNA
ggtatacatgttcctggtgaaatggcaggacctgtcggagaaggtggtgtacc

SEQ ID NO: 30044 - RNA, 53 nt, synthetic construct
  source 1..53: mol_type = other RNA
ggtctacatgttcctggtgaaatggcaggacctgtcggagaaggtggtttacc

SEQ ID NO: 30045 - RNA, 53 nt, synthetic construct
  source 1..53: mol_type = other RNA
ggtgtacatgttcctggtgaaatggcaggacctgtcggagaaggtggtatacc

SEQ ID NO: 30046 - RNA, 53 nt, synthetic construct
  source 1..53: mol_type = other RNA
ggtgtacatgttcctggtgaaatggcaggacctgtcggagaaggtggtgtacc

SEQ ID NO: 30047 - RNA, 53 nt, synthetic construct
  source 1..53: mol_type = other RNA
ggtgtacatgttcctggtgaaatggcaggacctgtcggagaaggtggtctacc

SEQ ID NO: 30048 - RNA, 53 nt, synthetic construct
  source 1..53: mol_type = other RNA
ggtttacatgttcctggtgaaatggcaggacctgtcggagaaggtggtttacc

SEQ ID NO: 30049 - RNA, 53 nt, synthetic construct
  source 1..53: mol_type = other RNA
ggtttacatgttcctggtgaaatggcaggacctgtcggagaaggtggtgtacc

SEQ ID NO: 30050 - RNA, 53 nt, synthetic construct
  source 1..53: mol_type = other RNA
ggtttacatgttcctggtgaaatggcaggacctgtcggagaaggtggtctacc

SEQ ID NO: 30051 - RNA, 53 nt, synthetic construct
  source 1..53: mol_type = other RNA
ggtgtacatgttcctggtgaaatggcaggacctgtcggagaaggtggtttacc

SEQ ID NO: 30052 - RNA, 54 nt, synthetic construct
  source 1..54: mol_type = other RNA
aggtatacatgttcctggtgaaatggcaggacctgtcggagaaggtggtatacc

SEQ ID NO: 30053 - RNA, 54 nt, synthetic construct
  source 1..54: mol_type = other RNA
aggtgtacatgttcctggtgaaatggcaggacctgtcggagaaggtggtgtacc

SEQ ID NO: 30054 - RNA, 54 nt, synthetic construct
  source 1..54: mol_type = other RNA
aggtgtacatgttcctggtgaaatggcaggacctgtcggagaaggtggtatacc

SEQ ID NO: 30055 - RNA, 54 nt, synthetic construct
  source 1..54: mol_type = other RNA
aggtctacatgttcctggtgaaatggcaggacctgtcggagaaggtggtttacc

SEQ ID NO: 30056 - RNA, 54 nt, synthetic construct
  source 1..54: mol_type = other RNA
aggtctacatgttcctggtgaaatggcaggacctgtcggagaaggtggtgtacc

SEQ ID NO: 30057 - RNA, 54 nt, synthetic construct
  source 1..54: mol_type = other RNA
aggtatacatgttcctggtgaaatggcaggacctgtcggagaaggtggtctacc

SEQ ID NO: 30058 - RNA, 54 nt, synthetic construct
  source 1..54: mol_type = other RNA
aggtatacatgttcctggtgaaatggcaggacctgtcggagaaggtggtttacc

SEQ ID NO: 30059 - RNA, 54 nt, synthetic construct
  source 1..54: mol_type = other RNA
aggtctacatgttcctggtgaaatggcaggacctgtcggagaaggtggtctacc

SEQ ID NO: 30060 - RNA, 54 nt, synthetic construct
  source 1..54: mol_type = other RNA
aggtttacatgttcctggtgaaatggcaggacctgtcggagaaggtggtatacc

SEQ ID NO: 30061 - RNA, 54 nt, synthetic construct
  source 1..54: mol_type = other RNA
aggtctacatgttcctggtgaaatggcaggacctgtcggagaaggtggtatacc

SEQ ID NO: 30062 - RNA, 54 nt, synthetic construct
  source 1..54: mol_type = other RNA
aggtttacatgttcctggtgaaatggcaggacctgtcggagaaggtggtctacc

SEQ ID NO: 30063 - RNA, 54 nt, synthetic construct
  source 1..54: mol_type = other RNA
aggtgtacatgttcctggtgaaatggcaggacctgtcggagaaggtggtctacc

SEQ ID NO: 30064 - RNA, 54 nt, synthetic construct
  source 1..54: mol_type = other RNA
aggtttacatgttcctggtgaaatggcaggacctgtcggagaaggtggtgtacc

SEQ ID NO: 30065 - RNA, 54 nt, synthetic construct
  source 1..54: mol_type = other RNA
aggtttacatgttcctggtgaaatggcaggacctgtcggagaaggtggtttacc

SEQ ID NO: 30066 - RNA, 54 nt, synthetic construct
  source 1..54: mol_type = other RNA
aggtgtacatgttcctggtgaaatggcaggacctgtcggagaaggtggtttacc

SEQ ID NO: 30067 - RNA, 54 nt, synthetic construct
  source 1..54: mol_type = other RNA
aggtatacatgttcctggtgaaatggcaggacctgtcggagaaggtggtgtacc

SEQ ID NO: 30068 - RNA, 55 nt, synthetic construct
  source 1..55: mol_type = other RNA
caggtatacatgttcctggtgaaatggcaggacctgtcggagaaggtggtatacc

SEQ ID NO: 30069 - RNA, 55 nt, synthetic construct
  source 1..55: mol_type = other RNA
caggtttacatgttcctggtgaaatggcaggacctgtcggagaaggtggtctacc

SEQ ID NO: 30070 - RNA, 55 nt, synthetic construct
  source 1..55: mol_type = other RNA
caggtttacatgttcctggtgaaatggcaggacctgtcggagaaggtggtatacc

SEQ ID NO: 30071 - RNA, 55 nt, synthetic construct
  source 1..55: mol_type = other RNA
caggtttacatgttcctggtgaaatggcaggacctgtcggagaaggtggtttacc

SEQ ID NO: 30072 - RNA, 55 nt, synthetic construct
  source 1..55: mol_type = other RNA
caggtgtacatgttcctggtgaaatggcaggacctgtcggagaaggtggtttacc

SEQ ID NO: 30073 - RNA, 55 nt, synthetic construct
  source 1..55: mol_type = other RNA
caggtgtacatgttcctggtgaaatggcaggacctgtcggagaaggtggtgtacc

SEQ ID NO: 30074 - RNA, 55 nt, synthetic construct
  source 1..55: mol_type = other RNA
caggtgtacatgttcctggtgaaatggcaggacctgtcggagaaggtggtctacc

SEQ ID NO: 30075 - RNA, 55 nt, synthetic construct
  source 1..55: mol_type = other RNA
caggtttacatgttcctggtgaaatggcaggacctgtcggagaaggtggtgtacc

SEQ ID NO: 30076 - RNA, 55 nt, synthetic construct
  source 1..55: mol_type = other RNA
caggtctacatgttcctggtgaaatggcaggacctgtcggagaaggtggtttacc

SEQ ID NO: 30077 - RNA, 55 nt, synthetic construct
  source 1..55: mol_type = other RNA
caggtctacatgttcctggtgaaatggcaggacctgtcggagaaggtggtgtacc

SEQ ID NO: 30078 - RNA, 55 nt, synthetic construct
  source 1..55: mol_type = other RNA
caggtctacatgttcctggtgaaatggcaggacctgtcggagaaggtggtatacc

SEQ ID NO: 30079 - RNA, 55 nt, synthetic construct
  source 1..55: mol_type = other RNA
caggtatacatgttcctggtgaaatggcaggacctgtcggagaaggtggtttacc

SEQ ID NO: 30080 - RNA, 55 nt, synthetic construct
  source 1..55: mol_type = other RNA
caggtgtacatgttcctggtgaaatggcaggacctgtcggagaaggtggtatacc

SEQ ID NO: 30081 - RNA, 55 nt, synthetic construct
  source 1..55: mol_type = other RNA
caggtatacatgttcctggtgaaatggcaggacctgtcggagaaggtggtgtacc

SEQ ID NO: 30082 - RNA, 55 nt, synthetic construct
  source 1..55: mol_type = other RNA
caggtatacatgttcctggtgaaatggcaggacctgtcggagaaggtggtctacc

SEQ ID NO: 30083 - RNA, 55 nt, synthetic construct
  source 1..55: mol_type = other RNA
caggtctacatgttcctggtgaaatggcaggacctgtcggagaaggtggtctacc

SEQ ID NO: 30084 - RNA, 56 nt, synthetic construct
  source 1..56: mol_type = other RNA
ccaggtgtacatgttcctggtgaaatggcaggacctgtcggagaaggtggtgtacc

SEQ ID NO: 30085 - RNA, 56 nt, synthetic construct
  source 1..56: mol_type = other RNA
ccaggtgtacatgttcctggtgaaatggcaggacctgtcggagaaggtggtctacc

SEQ ID NO: 30086 - RNA, 56 nt, synthetic construct
  source 1..56: mol_type = other RNA
ccaggtatacatgttcctggtgaaatggcaggacctgtcggagaaggtggtatacc

SEQ ID NO: 30087 - RNA, 56 nt, synthetic construct
  source 1..56: mol_type = other RNA
ccaggtttacatgttcctggtgaaatggcaggacctgtcggagaaggtggtttacc

SEQ ID NO: 30088 - RNA, 56 nt, synthetic construct
  source 1..56: mol_type = other RNA
ccaggtctacatgttcctggtgaaatggcaggacctgtcggagaaggtggtgtacc

SEQ ID NO: 30089 - RNA, 56 nt, synthetic construct
  source 1..56: mol_type = other RNA
ccaggtttacatgttcctggtgaaatggcaggacctgtcggagaaggtggtctacc

SEQ ID NO: 30090 - RNA, 56 nt, synthetic construct
  source 1..56: mol_type = other RNA
ccaggtttacatgttcctggtgaaatggcaggacctgtcggagaaggtggtatacc

SEQ ID NO: 30091 - RNA, 56 nt, synthetic construct
  source 1..56: mol_type = other RNA
ccaggtttacatgttcctggtgaaatggcaggacctgtcggagaaggtggtgtacc

SEQ ID NO: 30092 - RNA, 56 nt, synthetic construct
  source 1..56: mol_type = other RNA
ccaggtatacatgttcctggtgaaatggcaggacctgtcggagaaggtggtctacc

SEQ ID NO: 30093 - RNA, 56 nt, synthetic construct
  source 1..56: mol_type = other RNA
ccaggtgtacatgttcctggtgaaatggcaggacctgtcggagaaggtggtttacc

SEQ ID NO: 30094 - RNA, 56 nt, synthetic construct
  source 1..56: mol_type = other RNA
ccaggtctacatgttcctggtgaaatggcaggacctgtcggagaaggtggtctacc

SEQ ID NO: 30095 - RNA, 56 nt, synthetic construct
  source 1..56: mol_type = other RNA
ccaggtctacatgttcctggtgaaatggcaggacctgtcggagaaggtggtttacc

SEQ ID NO: 30096 - RNA, 56 nt, synthetic construct
  source 1..56: mol_type = other RNA
ccaggtgtacatgttcctggtgaaatggcaggacctgtcggagaaggtggtatacc

SEQ ID NO: 30097 - RNA, 56 nt, synthetic construct
  source 1..56: mol_type = other RNA
ccaggtatacatgttcctggtgaaatggcaggacctgtcggagaaggtggtgtacc

SEQ ID NO: 30098 - RNA, 56 nt, synthetic construct
  source 1..56: mol_type = other RNA
ccaggtatacatgttcctggtgaaatggcaggacctgtcggagaaggtggtttacc

SEQ ID NO: 30099 - RNA, 56 nt, synthetic construct
  source 1..56: mol_type = other RNA
ccaggtctacatgttcctggtgaaatggcaggacctgtcggagaaggtggtatacc

SEQ ID NO: 30100 - RNA, 57 nt, synthetic construct
  source 1..57: mol_type = other RNA
cccaggtttacatgttcctggtgaaatggcaggacctgtcggagaaggtggtttacc

SEQ ID NO: 30101 - RNA, 57 nt, synthetic construct
  source 1..57: mol_type = other RNA
cccaggtgtacatgttcctggtgaaatggcaggacctgtcggagaaggtggtgtacc

SEQ ID NO: 30102 - RNA, 57 nt, synthetic construct
  source 1..57: mol_type = other RNA
cccaggtgtacatgttcctggtgaaatggcaggacctgtcggagaaggtggtttacc

SEQ ID NO: 30103 - RNA, 57 nt, synthetic construct
  source 1..57: mol_type = other RNA
cccaggtctacatgttcctggtgaaatggcaggacctgtcggagaaggtggtttacc

SEQ ID NO: 30104 - RNA, 57 nt, synthetic construct
  source 1..57: mol_type = other RNA
cccaggtatacatgttcctggtgaaatggcaggacctgtcggagaaggtggtatacc

SEQ ID NO: 30105 - RNA, 57 nt, synthetic construct
  source 1..57: mol_type = other RNA
cccaggtttacatgttcctggtgaaatggcaggacctgtcggagaaggtggtgtacc

SEQ ID NO: 30106 - RNA, 57 nt, synthetic construct
  source 1..57: mol_type = other RNA
cccaggtttacatgttcctggtgaaatggcaggacctgtcggagaaggtggtatacc

SEQ ID NO: 30107 - RNA, 57 nt, synthetic construct
  source 1..57: mol_type = other RNA
cccaggtgtacatgttcctggtgaaatggcaggacctgtcggagaaggtggtctacc

SEQ ID NO: 30108 - RNA, 57 nt, synthetic construct
  source 1..57: mol_type = other RNA
cccaggtgtacatgttcctggtgaaatggcaggacctgtcggagaaggtggtatacc

SEQ ID NO: 30109 - RNA, 57 nt, synthetic construct
  source 1..57: mol_type = other RNA
cccaggtctacatgttcctggtgaaatggcaggacctgtcggagaaggtggtgtacc

SEQ ID NO: 30110 - RNA, 57 nt, synthetic construct
  source 1..57: mol_type = other RNA
cccaggtctacatgttcctggtgaaatggcaggacctgtcggagaaggtggtctacc

SEQ ID NO: 30111 - RNA, 57 nt, synthetic construct
  source 1..57: mol_type = other RNA
cccaggtctacatgttcctggtgaaatggcaggacctgtcggagaaggtggtatacc

SEQ ID NO: 30112 - RNA, 57 nt, synthetic construct
  source 1..57: mol_type = other RNA
cccaggtatacatgttcctggtgaaatggcaggacctgtcggagaaggtggtttacc

SEQ ID NO: 30113 - RNA, 57 nt, synthetic construct
  source 1..57: mol_type = other RNA
cccaggtatacatgttcctggtgaaatggcaggacctgtcggagaaggtggtgtacc

SEQ ID NO: 30114 - RNA, 57 nt, synthetic construct
  source 1..57: mol_type = other RNA
cccaggtatacatgttcctggtgaaatggcaggacctgtcggagaaggtggtctacc

SEQ ID NO: 30115 - RNA, 57 nt, synthetic construct
  source 1..57: mol_type = other RNA
cccaggtttacatgttcctggtgaaatggcaggacctgtcggagaaggtggtctacc

SEQ ID NO: 30116 - RNA, 58 nt, synthetic construct
  source 1..58: mol_type = other RNA
ccccaggtttacatgttcctggtgaaatggcaggacctgtcggagaaggtggtatacc

SEQ ID NO: 30117 - RNA, 58 nt, synthetic construct
  source 1..58: mol_type = other RNA
ccccaggtctacatgttcctggtgaaatggcaggacctgtcggagaaggtggtctacc

SEQ ID NO: 30118 - RNA, 58 nt, synthetic construct
  source 1..58: mol_type = other RNA
ccccaggtttacatgttcctggtgaaatggcaggacctgtcggagaaggtggtttacc

SEQ ID NO: 30119 - RNA, 58 nt, synthetic construct
  source 1..58: mol_type = other RNA
ccccaggtatacatgttcctggtgaaatggcaggacctgtcggagaaggtggtatacc

SEQ ID NO: 30120 - RNA, 58 nt, synthetic construct
  source 1..58: mol_type = other RNA
ccccaggtatacatgttcctggtgaaatggcaggacctgtcggagaaggtggtctacc

SEQ ID NO: 30121 - RNA, 58 nt, synthetic construct
  source 1..58: mol_type = other RNA
ccccaggtatacatgttcctggtgaaatggcaggacctgtcggagaaggtggtgtacc

SEQ ID NO: 30122 - RNA, 58 nt, synthetic construct
  source 1..58: mol_type = other RNA
ccccaggtatacatgttcctggtgaaatggcaggacctgtcggagaaggtggtttacc

SEQ ID NO: 30123 - RNA, 58 nt, synthetic construct
  source 1..58: mol_type = other RNA
ccccaggtgtacatgttcctggtgaaatggcaggacctgtcggagaaggtggtttacc

SEQ ID NO: 30124 - RNA, 58 nt, synthetic construct
  source 1..58: mol_type = other RNA
ccccaggtttacatgttcctggtgaaatggcaggacctgtcggagaaggtggtgtacc

SEQ ID NO: 30125 - RNA, 58 nt, synthetic construct
  source 1..58: mol_type = other RNA
ccccaggtctacatgttcctggtgaaatggcaggacctgtcggagaaggtggtgtacc

SEQ ID NO: 30126 - RNA, 58 nt, synthetic construct
  source 1..58: mol_type = other RNA
ccccaggtgtacatgttcctggtgaaatggcaggacctgtcggagaaggtggtatacc

SEQ ID NO: 30127 - RNA, 58 nt, synthetic construct
  source 1..58: mol_type = other RNA
ccccaggtgtacatgttcctggtgaaatggcaggacctgtcggagaaggtggtctacc

SEQ ID NO: 30128 - RNA, 58 nt, synthetic construct
  source 1..58: mol_type = other RNA
ccccaggtttacatgttcctggtgaaatggcaggacctgtcggagaaggtggtctacc

SEQ ID NO: 30129 - RNA, 58 nt, synthetic construct
  source 1..58: mol_type = other RNA
ccccaggtgtacatgttcctggtgaaatggcaggacctgtcggagaaggtggtgtacc

SEQ ID NO: 30130 - RNA, 58 nt, synthetic construct
  source 1..58: mol_type = other RNA
ccccaggtctacatgttcctggtgaaatggcaggacctgtcggagaaggtggtatacc

SEQ ID NO: 30131 - RNA, 58 nt, synthetic construct
  source 1..58: mol_type = other RNA
ccccaggtctacatgttcctggtgaaatggcaggacctgtcggagaaggtggtttacc

SEQ ID NO: 30132 - RNA, 59 nt, synthetic construct
  source 1..59: mol_type = other RNA
cccccaggtctacatgttcctggtgaaatggcaggacctgtcggagaaggtggtctacc

SEQ ID NO: 30133 - RNA, 59 nt, synthetic construct
  source 1..59: mol_type = other RNA
cccccaggtctacatgttcctggtgaaatggcaggacctgtcggagaaggtggtatacc

SEQ ID NO: 30134 - RNA, 59 nt, synthetic construct
  source 1..59: mol_type = other RNA
cccccaggtatacatgttcctggtgaaatggcaggacctgtcggagaaggtggtttacc

SEQ ID NO: 30135 - RNA, 59 nt, synthetic construct
  source 1..59: mol_type = other RNA
cccccaggtatacatgttcctggtgaaatggcaggacctgtcggagaaggtggtgtacc

SEQ ID NO: 30136 - RNA, 59 nt, synthetic construct
  source 1..59: mol_type = other RNA
cccccaggtatacatgttcctggtgaaatggcaggacctgtcggagaaggtggtctacc

SEQ ID NO: 30137 - RNA, 59 nt, synthetic construct
  source 1..59: mol_type = other RNA
cccccaggtatacatgttcctggtgaaatggcaggacctgtcggagaaggtggtatacc

SEQ ID NO: 30138 - RNA, 59 nt, synthetic construct
  source 1..59: mol_type = other RNA
cccccaggtttacatgttcctggtgaaatggcaggacctgtcggagaaggtggtgtacc

SEQ ID NO: 30139 - RNA, 59 nt, synthetic construct
  source 1..59: mol_type = other RNA
cccccaggtgtacatgttcctggtgaaatggcaggacctgtcggagaaggtggtttacc

SEQ ID NO: 30140 - RNA, 59 nt, synthetic construct
  source 1..59: mol_type = other RNA
cccccaggtctacatgttcctggtgaaatggcaggacctgtcggagaaggtggtgtacc

SEQ ID NO: 30141 - RNA, 59 nt, synthetic construct
  source 1..59: mol_type = other RNA
cccccaggtctacatgttcctggtgaaatggcaggacctgtcggagaaggtggtttacc

SEQ ID NO: 30142 - RNA, 59 nt, synthetic construct
  source 1..59: mol_type = other RNA
cccccaggtgtacatgttcctggtgaaatggcaggacctgtcggagaaggtggtctacc

SEQ ID NO: 30143 - RNA, 59 nt, synthetic construct
  source 1..59: mol_type = other RNA
cccccaggtgtacatgttcctggtgaaatggcaggacctgtcggagaaggtggtatacc

SEQ ID NO: 30144 - RNA, 59 nt, synthetic construct
  source 1..59: mol_type = other RNA
cccccaggtttacatgttcctggtgaaatggcaggacctgtcggagaaggtggtatacc

SEQ ID NO: 30145 - RNA, 59 nt, synthetic construct
  source 1..59: mol_type = other RNA
cccccaggtttacatgttcctggtgaaatggcaggacctgtcggagaaggtggtttacc

SEQ ID NO: 30146 - RNA, 59 nt, synthetic construct
  source 1..59: mol_type = other RNA
cccccaggtttacatgttcctggtgaaatggcaggacctgtcggagaaggtggtctacc

SEQ ID NO: 30147 - RNA, 59 nt, synthetic construct
  source 1..59: mol_type = other RNA
cccccaggtgtacatgttcctggtgaaatggcaggacctgtcggagaaggtggtgtacc

SEQ ID NO: 30148 - RNA, 60 nt, synthetic construct
  source 1..60: mol_type = other RNA
tcccccaggtttacatgttcctggtgaaatggcaggacctgtcggagaaggtggtttacc

SEQ ID NO: 30149 - RNA, 60 nt, synthetic construct
  source 1..60: mol_type = other RNA
tcccccaggtgtacatgttcctggtgaaatggcaggacctgtcggagaaggtggtgtacc

SEQ ID NO: 30150 - RNA, 60 nt, synthetic construct
  source 1..60: mol_type = other RNA
tcccccaggtgtacatgttcctggtgaaatggcaggacctgtcggagaaggtggtttacc

SEQ ID NO: 30151 - RNA, 60 nt, synthetic construct
  source 1..60: mol_type = other RNA
tcccccaggtgtacatgttcctggtgaaatggcaggacctgtcggagaaggtggtctacc

SEQ ID NO: 30152 - RNA, 60 nt, synthetic construct
  source 1..60: mol_type = other RNA
tcccccaggtctacatgttcctggtgaaatggcaggacctgtcggagaaggtggtttacc

SEQ ID NO: 30153 - RNA, 60 nt, synthetic construct
  source 1..60: mol_type = other RNA
tcccccaggtgtacatgttcctggtgaaatggcaggacctgtcggagaaggtggtatacc

SEQ ID NO: 30154 - RNA, 60 nt, synthetic construct
  source 1..60: mol_type = other RNA
tcccccaggtctacatgttcctggtgaaatggcaggacctgtcggagaaggtggtctacc

SEQ ID NO: 30155 - RNA, 60 nt, synthetic construct
  source 1..60: mol_type = other RNA
tcccccaggtctacatgttcctggtgaaatggcaggacctgtcggagaaggtggtatacc

SEQ ID NO: 30156 - RNA, 60 nt, synthetic construct
  source 1..60: mol_type = other RNA
tcccccaggtatacatgttcctggtgaaatggcaggacctgtcggagaaggtggtttacc

SEQ ID NO: 30157 - RNA, 60 nt, synthetic construct
  source 1..60: mol_type = other RNA
tcccccaggtatacatgttcctggtgaaatggcaggacctgtcggagaaggtggtgtacc

SEQ ID NO: 30158 - RNA, 60 nt, synthetic construct
  source 1..60: mol_type = other RNA
tcccccaggtatacatgttcctggtgaaatggcaggacctgtcggagaaggtggtctacc

SEQ ID NO: 30159 - RNA, 60 nt, synthetic construct
  source 1..60: mol_type = other RNA
tcccccaggtttacatgttcctggtgaaatggcaggacctgtcggagaaggtggtgtacc

SEQ ID NO: 30160 - RNA, 60 nt, synthetic construct
  source 1..60: mol_type = other RNA
tcccccaggtatacatgttcctggtgaaatggcaggacctgtcggagaaggtggtatacc

SEQ ID NO: 30161 - RNA, 60 nt, synthetic construct
  source 1..60: mol_type = other RNA
tcccccaggtctacatgttcctggtgaaatggcaggacctgtcggagaaggtggtgtacc

SEQ ID NO: 30162 - RNA, 60 nt, synthetic construct
  source 1..60: mol_type = other RNA
tcccccaggtttacatgttcctggtgaaatggcaggacctgtcggagaaggtggtctacc

SEQ ID NO: 30163 - RNA, 60 nt, synthetic construct
  source 1..60: mol_type = other RNA
tcccccaggtttacatgttcctggtgaaatggcaggacctgtcggagaaggtggtatacc

SEQ ID NO: 30164 - RNA, 61 nt, synthetic construct
  source 1..61: mol_type = other RNA
ttcccccaggtttacatgttcctggtgaaatggcaggacctgtcggagaaggtggtttacc

SEQ ID NO: 30165 - RNA, 61 nt, synthetic construct
  source 1..61: mol_type = other RNA
ttcccccaggtgtacatgttcctggtgaaatggcaggacctgtcggagaaggtggtctacc

SEQ ID NO: 30166 - RNA, 61 nt, synthetic construct
  source 1..61: mol_type = other RNA
ttcccccaggtgtacatgttcctggtgaaatggcaggacctgtcggagaaggtggtgtacc

SEQ ID NO: 30167 - RNA, 61 nt, synthetic construct
  source 1..61: mol_type = other RNA
ttcccccaggtttacatgttcctggtgaaatggcaggacctgtcggagaaggtggtatacc

SEQ ID NO: 30168 - RNA, 61 nt, synthetic construct
  source 1..61: mol_type = other RNA
ttcccccaggtctacatgttcctggtgaaatggcaggacctgtcggagaaggtggtttacc

SEQ ID NO: 30169 - RNA, 61 nt, synthetic construct
  source 1..61: mol_type = other RNA
ttcccccaggtttacatgttcctggtgaaatggcaggacctgtcggagaaggtggtctacc

SEQ ID NO: 30170 - RNA, 61 nt, synthetic construct
  source 1..61: mol_type = other RNA
ttcccccaggtctacatgttcctggtgaaatggcaggacctgtcggagaaggtggtctacc

SEQ ID NO: 30171 - RNA, 61 nt, synthetic construct
  source 1..61: mol_type = other RNA
ttcccccaggtctacatgttcctggtgaaatggcaggacctgtcggagaaggtggtatacc

SEQ ID NO: 30172 - RNA, 61 nt, synthetic construct
  source 1..61: mol_type = other RNA
ttcccccaggtatacatgttcctggtgaaatggcaggacctgtcggagaaggtggtttacc

SEQ ID NO: 30173 - RNA, 61 nt, synthetic construct
  source 1..61: mol_type = other RNA
ttcccccaggtatacatgttcctggtgaaatggcaggacctgtcggagaaggtggtgtacc

SEQ ID NO: 30174 - RNA, 61 nt, synthetic construct
  source 1..61: mol_type = other RNA
ttcccccaggtatacatgttcctggtgaaatggcaggacctgtcggagaaggtggtatacc

SEQ ID NO: 30175 - RNA, 61 nt, synthetic construct
  source 1..61: mol_type = other RNA
ttcccccaggtttacatgttcctggtgaaatggcaggacctgtcggagaaggtggtgtacc

SEQ ID NO: 30176 - RNA, 61 nt, synthetic construct
  source 1..61: mol_type = other RNA
ttcccccaggtgtacatgttcctggtgaaatggcaggacctgtcggagaaggtggtttacc

SEQ ID NO: 30177 - RNA, 61 nt, synthetic construct
  source 1..61: mol_type = other RNA
ttcccccaggtgtacatgttcctggtgaaatggcaggacctgtcggagaaggtggtatacc

SEQ ID NO: 30178 - RNA, 61 nt, synthetic construct
  source 1..61: mol_type = other RNA
ttcccccaggtatacatgttcctggtgaaatggcaggacctgtcggagaaggtggtctacc

SEQ ID NO: 30179 - RNA, 61 nt, synthetic construct
  source 1..61: mol_type = other RNA
ttcccccaggtctacatgttcctggtgaaatggcaggacctgtcggagaaggtggtgtacc

SEQ ID NO: 30180 - RNA, 62 nt, synthetic construct
  source 1..62: mol_type = other RNA
tttcccccaggtttacatgttcctggtgaaatggcaggacctgtcggagaaggtggtgtacc

SEQ ID NO: 30181 - RNA, 62 nt, synthetic construct
  source 1..62: mol_type = other RNA
tttcccccaggtctacatgttcctggtgaaatggcaggacctgtcggagaaggtggtctacc

SEQ ID NO: 30182 - RNA, 62 nt, synthetic construct
  source 1..62: mol_type = other RNA
tttcccccaggtctacatgttcctggtgaaatggcaggacctgtcggagaaggtggtgtacc

SEQ ID NO: 30183 - RNA, 62 nt, synthetic construct
  source 1..62: mol_type = other RNA
tttcccccaggtctacatgttcctggtgaaatggcaggacctgtcggagaaggtggtttacc

SEQ ID NO: 30184 - RNA, 62 nt, synthetic construct
  source 1..62: mol_type = other RNA
tttcccccaggtgtacatgttcctggtgaaatggcaggacctgtcggagaaggtggtatacc

SEQ ID NO: 30185 - RNA, 62 nt, synthetic construct
  source 1..62: mol_type = other RNA
tttcccccaggtgtacatgttcctggtgaaatggcaggacctgtcggagaaggtggtctacc

SEQ ID NO: 30186 - RNA, 62 nt, synthetic construct
  source 1..62: mol_type = other RNA
tttcccccaggtgtacatgttcctggtgaaatggcaggacctgtcggagaaggtggtgtacc

SEQ ID NO: 30187 - RNA, 62 nt, synthetic construct
  source 1..62: mol_type = other RNA
tttcccccaggtttacatgttcctggtgaaatggcaggacctgtcggagaaggtggtatacc

SEQ ID NO: 30188 - RNA, 62 nt, synthetic construct
  source 1..62: mol_type = other RNA
tttcccccaggtctacatgttcctggtgaaatggcaggacctgtcggagaaggtggtatacc

SEQ ID NO: 30189 - RNA, 62 nt, synthetic construct
  source 1..62: mol_type = other RNA
tttcccccaggtatacatgttcctggtgaaatggcaggacctgtcggagaaggtggtttacc

SEQ ID NO: 30190 - RNA, 62 nt, synthetic construct
  source 1..62: mol_type = other RNA
tttcccccaggtatacatgttcctggtgaaatggcaggacctgtcggagaaggtggtatacc

SEQ ID NO: 30191 - RNA, 62 nt, synthetic construct
  source 1..62: mol_type = other RNA
tttcccccaggtatacatgttcctggtgaaatggcaggacctgtcggagaaggtggtgtacc

SEQ ID NO: 30192 - RNA, 62 nt, synthetic construct
  source 1..62: mol_type = other RNA
tttcccccaggtttacatgttcctggtgaaatggcaggacctgtcggagaaggtggtttacc

SEQ ID NO: 30193 - RNA, 62 nt, synthetic construct
  source 1..62: mol_type = other RNA
tttcccccaggtttacatgttcctggtgaaatggcaggacctgtcggagaaggtggtctacc

SEQ ID NO: 30194 - RNA, 62 nt, synthetic construct
  source 1..62: mol_type = other RNA
tttcccccaggtgtacatgttcctggtgaaatggcaggacctgtcggagaaggtggtttacc

SEQ ID NO: 30195 - RNA, 62 nt, synthetic construct
  source 1..62: mol_type = other RNA
tttcccccaggtatacatgttcctggtgaaatggcaggacctgtcggagaaggtggtctacc

SEQ ID NO: 30196 - RNA, 63 nt, synthetic construct
  source 1..63: mol_type = other RNA
ctttcccccaggtgtacatgttcctggtgaaatggcaggacctgtcggagaaggtggtttacc

SEQ ID NO: 30197 - RNA, 63 nt, synthetic construct
  source 1..63: mol_type = other RNA
ctttcccccaggtgtacatgttcctggtgaaatggcaggacctgtcggagaaggtggtgtacc

SEQ ID NO: 30198 - RNA, 63 nt, synthetic construct
  source 1..63: mol_type = other RNA
ctttcccccaggtttacatgttcctggtgaaatggcaggacctgtcggagaaggtggtatacc

SEQ ID NO: 30199 - RNA, 63 nt, synthetic construct
  source 1..63: mol_type = other RNA
ctttcccccaggtctacatgttcctggtgaaatggcaggacctgtcggagaaggtggtttacc

SEQ ID NO: 30200 - RNA, 63 nt, synthetic construct
  source 1..63: mol_type = other RNA
ctttcccccaggtgtacatgttcctggtgaaatggcaggacctgtcggagaaggtggtatacc

SEQ ID NO: 30201 - RNA, 63 nt, synthetic construct
  source 1..63: mol_type = other RNA
ctttcccccaggtatacatgttcctggtgaaatggcaggacctgtcggagaaggtggtgtacc

SEQ ID NO: 30202 - RNA, 63 nt, synthetic construct
  source 1..63: mol_type = other RNA
ctttcccccaggtatacatgttcctggtgaaatggcaggacctgtcggagaaggtggtctacc

SEQ ID NO: 30203 - RNA, 63 nt, synthetic construct
  source 1..63: mol_type = other RNA
ctttcccccaggtctacatgttcctggtgaaatggcaggacctgtcggagaaggtggtctacc

SEQ ID NO: 30204 - RNA, 63 nt, synthetic construct
  source 1..63: mol_type = other RNA
ctttcccccaggtctacatgttcctggtgaaatggcaggacctgtcggagaaggtggtatacc

SEQ ID NO: 30205 - RNA, 63 nt, synthetic construct
  source 1..63: mol_type = other RNA
ctttcccccaggtctacatgttcctggtgaaatggcaggacctgtcggagaaggtggtgtacc

SEQ ID NO: 30206 - RNA, 63 nt, synthetic construct
  source 1..63: mol_type = other RNA
ctttcccccaggtttacatgttcctggtgaaatggcaggacctgtcggagaaggtggtttacc

SEQ ID NO: 30207 - RNA, 63 nt, synthetic construct
  source 1..63: mol_type = other RNA
ctttcccccaggtgtacatgttcctggtgaaatggcaggacctgtcggagaaggtggtctacc

SEQ ID NO: 30208 - RNA, 63 nt, synthetic construct
  source 1..63: mol_type = other RNA
ctttcccccaggtatacatgttcctggtgaaatggcaggacctgtcggagaaggtggtatacc

SEQ ID NO: 30209 - RNA, 63 nt, synthetic construct
  source 1..63: mol_type = other RNA
ctttcccccaggtatacatgttcctggtgaaatggcaggacctgtcggagaaggtggtttacc

SEQ ID NO: 30210 - RNA, 63 nt, synthetic construct
  source 1..63: mol_type = other RNA
ctttcccccaggtttacatgttcctggtgaaatggcaggacctgtcggagaaggtggtctacc

SEQ ID NO: 30211 - RNA, 63 nt, synthetic construct
  source 1..63: mol_type = other RNA
ctttcccccaggtttacatgttcctggtgaaatggcaggacctgtcggagaaggtggtgtacc

SEQ ID NO: 30212 - RNA, 64 nt, synthetic construct
  source 1..64: mol_type = other RNA
gctttcccccaggtgtacatgttcctggtgaaatggcaggacctgtcggagaaggtggtgtacc

SEQ ID NO: 30213 - RNA, 64 nt, synthetic construct
  source 1..64: mol_type = other RNA
gctttcccccaggtctacatgttcctggtgaaatggcaggacctgtcggagaaggtggtgtacc

SEQ ID NO: 30214 - RNA, 64 nt, synthetic construct
  source 1..64: mol_type = other RNA
gctttcccccaggtctacatgttcctggtgaaatggcaggacctgtcggagaaggtggtctacc

SEQ ID NO: 30215 - RNA, 64 nt, synthetic construct
  source 1..64: mol_type = other RNA
gctttcccccaggtctacatgttcctggtgaaatggcaggacctgtcggagaaggtggtatacc

SEQ ID NO: 30216 - RNA, 64 nt, synthetic construct
  source 1..64: mol_type = other RNA
gctttcccccaggtatacatgttcctggtgaaatggcaggacctgtcggagaaggtggtgtacc

SEQ ID NO: 30217 - RNA, 64 nt, synthetic construct
  source 1..64: mol_type = other RNA
gctttcccccaggtatacatgttcctggtgaaatggcaggacctgtcggagaaggtggtctacc

SEQ ID NO: 30218 - RNA, 64 nt, synthetic construct
  source 1..64: mol_type = other RNA
gctttcccccaggtatacatgttcctggtgaaatggcaggacctgtcggagaaggtggtatacc

SEQ ID NO: 30219 - RNA, 64 nt, synthetic construct
  source 1..64: mol_type = other RNA
gctttcccccaggtctacatgttcctggtgaaatggcaggacctgtcggagaaggtggtttacc

SEQ ID NO: 30220 - RNA, 64 nt, synthetic construct
  source 1..64: mol_type = other RNA
gctttcccccaggtatacatgttcctggtgaaatggcaggacctgtcggagaaggtggtttacc

SEQ ID NO: 30221 - RNA, 64 nt, synthetic construct
  source 1..64: mol_type = other RNA
gctttcccccaggtttacatgttcctggtgaaatggcaggacctgtcggagaaggtggtgtacc

SEQ ID NO: 30222 - RNA, 64 nt, synthetic construct
  source 1..64: mol_type = other RNA
gctttcccccaggtttacatgttcctggtgaaatggcaggacctgtcggagaaggtggtctacc

SEQ ID NO: 30223 - RNA, 64 nt, synthetic construct
  source 1..64: mol_type = other RNA
gctttcccccaggtttacatgttcctggtgaaatggcaggacctgtcggagaaggtggtatacc

SEQ ID NO: 30224 - RNA, 64 nt, synthetic construct
  source 1..64: mol_type = other RNA
gctttcccccaggtgtacatgttcctggtgaaatggcaggacctgtcggagaaggtggtatacc

SEQ ID NO: 30225 - RNA, 64 nt, synthetic construct
  source 1..64: mol_type = other RNA
gctttcccccaggtgtacatgttcctggtgaaatggcaggacctgtcggagaaggtggtctacc

SEQ ID NO: 30226 - RNA, 64 nt, synthetic construct
  source 1..64: mol_type = other RNA
gctttcccccaggtttacatgttcctggtgaaatggcaggacctgtcggagaaggtggtttacc

SEQ ID NO: 30227 - RNA, 64 nt, synthetic construct
  source 1..64: mol_type = other RNA
gctttcccccaggtgtacatgttcctggtgaaatggcaggacctgtcggagaaggtggtttacc

SEQ ID NO: 30228 - RNA, 65 nt, synthetic construct
  source 1..65: mol_type = other RNA
ggctttcccccaggtttacatgttcctggtgaaatggcaggacctgtcggagaaggtggtgtacc

SEQ ID NO: 30229 - RNA, 65 nt, synthetic construct
  source 1..65: mol_type = other RNA
ggctttcccccaggtatacatgttcctggtgaaatggcaggacctgtcggagaaggtggtatacc

SEQ ID NO: 30230 - RNA, 65 nt, synthetic construct
  source 1..65: mol_type = other RNA
ggctttcccccaggtttacatgttcctggtgaaatggcaggacctgtcggagaaggtggtttacc

SEQ ID NO: 30231 - RNA, 65 nt, synthetic construct
  source 1..65: mol_type = other RNA
ggctttcccccaggtttacatgttcctggtgaaatggcaggacctgtcggagaaggtggtctacc

SEQ ID NO: 30232 - RNA, 65 nt, synthetic construct
  source 1..65: mol_type = other RNA
ggctttcccccaggtgtacatgttcctggtgaaatggcaggacctgtcggagaaggtggtctacc

SEQ ID NO: 30233 - RNA, 65 nt, synthetic construct
  source 1..65: mol_type = other RNA
ggctttcccccaggtgtacatgttcctggtgaaatggcaggacctgtcggagaaggtggtgtacc

SEQ ID NO: 30234 - RNA, 65 nt, synthetic construct
  source 1..65: mol_type = other RNA
ggctttcccccaggtttacatgttcctggtgaaatggcaggacctgtcggagaaggtggtatacc

SEQ ID NO: 30235 - RNA, 65 nt, synthetic construct
  source 1..65: mol_type = other RNA
ggctttcccccaggtctacatgttcctggtgaaatggcaggacctgtcggagaaggtggtttacc

SEQ ID NO: 30236 - RNA, 65 nt, synthetic construct
  source 1..65: mol_type = other RNA
ggctttcccccaggtgtacatgttcctggtgaaatggcaggacctgtcggagaaggtggtttacc

SEQ ID NO: 30237 - RNA, 65 nt, synthetic construct
  source 1..65: mol_type = other RNA
ggctttcccccaggtctacatgttcctggtgaaatggcaggacctgtcggagaaggtggtgtacc

SEQ ID NO: 30238 - RNA, 65 nt, synthetic construct
  source 1..65: mol_type = other RNA
ggctttcccccaggtctacatgttcctggtgaaatggcaggacctgtcggagaaggtggtatacc

SEQ ID NO: 30239 - RNA, 65 nt, synthetic construct
  source 1..65: mol_type = other RNA
ggctttcccccaggtctacatgttcctggtgaaatggcaggacctgtcggagaaggtggtctacc

SEQ ID NO: 30240 - RNA, 65 nt, synthetic construct
  source 1..65: mol_type = other RNA
ggctttcccccaggtatacatgttcctggtgaaatggcaggacctgtcggagaaggtggtctacc

SEQ ID NO: 30241 - RNA, 65 nt, synthetic construct
  source 1..65: mol_type = other RNA
ggctttcccccaggtgtacatgttcctggtgaaatggcaggacctgtcggagaaggtggtatacc

SEQ ID NO: 30242 - RNA, 65 nt, synthetic construct
  source 1..65: mol_type = other RNA
ggctttcccccaggtatacatgttcctggtgaaatggcaggacctgtcggagaaggtggtgtacc

SEQ ID NO: 30243 - RNA, 65 nt, synthetic construct
  source 1..65: mol_type = other RNA
ggctttcccccaggtatacatgttcctggtgaaatggcaggacctgtcggagaaggtggtttacc

SEQ ID NO: 30244 - RNA, 66 nt, synthetic construct
  source 1..66: mol_type = other RNA
tggctttcccccaggtatacatgttcctggtgaaatggcaggacctgtcggagaaggtggtatacc

SEQ ID NO: 30245 - RNA, 66 nt, synthetic construct
  source 1..66: mol_type = other RNA
tggctttcccccaggtatacatgttcctggtgaaatggcaggacctgtcggagaaggtggtgtacc

SEQ ID NO: 30246 - RNA, 66 nt, synthetic construct
  source 1..66: mol_type = other RNA
tggctttcccccaggtatacatgttcctggtgaaatggcaggacctgtcggagaaggtggtttacc

SEQ ID NO: 30247 - RNA, 66 nt, synthetic construct
  source 1..66: mol_type = other RNA
tggctttcccccaggtgtacatgttcctggtgaaatggcaggacctgtcggagaaggtggtctacc

SEQ ID NO: 30248 - RNA, 66 nt, synthetic construct
  source 1..66: mol_type = other RNA
tggctttcccccaggtctacatgttcctggtgaaatggcaggacctgtcggagaaggtggtctacc

SEQ ID NO: 30249 - RNA, 66 nt, synthetic construct
  source 1..66: mol_type = other RNA
tggctttcccccaggtctacatgttcctggtgaaatggcaggacctgtcggagaaggtggtttacc

SEQ ID NO: 30250 - RNA, 66 nt, synthetic construct
  source 1..66: mol_type = other RNA
tggctttcccccaggtctacatgttcctggtgaaatggcaggacctgtcggagaaggtggtgtacc

SEQ ID NO: 30251 - RNA, 66 nt, synthetic construct
  source 1..66: mol_type = other RNA
tggctttcccccaggtatacatgttcctggtgaaatggcaggacctgtcggagaaggtggtctacc

SEQ ID NO: 30252 - RNA, 66 nt, synthetic construct
  source 1..66: mol_type = other RNA
tggctttcccccaggtgtacatgttcctggtgaaatggcaggacctgtcggagaaggtggtatacc

SEQ ID NO: 30253 - RNA, 66 nt, synthetic construct
  source 1..66: mol_type = other RNA
tggctttcccccaggtgtacatgttcctggtgaaatggcaggacctgtcggagaaggtggtgtacc

SEQ ID NO: 30254 - RNA, 66 nt, synthetic construct
  source 1..66: mol_type = other RNA
tggctttcccccaggtgtacatgttcctggtgaaatggcaggacctgtcggagaaggtggtttacc

SEQ ID NO: 30255 - RNA, 66 nt, synthetic construct
  source 1..66: mol_type = other RNA
tggctttcccccaggtctacatgttcctggtgaaatggcaggacctgtcggagaaggtggtatacc

SEQ ID NO: 30256 - RNA, 66 nt, synthetic construct
  source 1..66: mol_type = other RNA
tggctttcccccaggtttacatgttcctggtgaaatggcaggacctgtcggagaaggtggtatacc

SEQ ID NO: 30257 - RNA, 66 nt, synthetic construct
  source 1..66: mol_type = other RNA
tggctttcccccaggtttacatgttcctggtgaaatggcaggacctgtcggagaaggtggtgtacc

SEQ ID NO: 30258 - RNA, 66 nt, synthetic construct
  source 1..66: mol_type = other RNA
tggctttcccccaggtttacatgttcctggtgaaatggcaggacctgtcggagaaggtggtctacc

SEQ ID NO: 30259 - RNA, 66 nt, synthetic construct
  source 1..66: mol_type = other RNA
tggctttcccccaggtttacatgttcctggtgaaatggcaggacctgtcggagaaggtggtttacc

SEQ ID NO: 30260 - RNA, 67 nt, synthetic construct
  source 1..67: mol_type = other RNA
ctggctttcccccaggtttacatgttcctggtgaaatggcaggacctgtcggagaaggtggtgtacc

SEQ ID NO: 30261 - RNA, 67 nt, synthetic construct
  source 1..67: mol_type = other RNA
ctggctttcccccaggtttacatgttcctggtgaaatggcaggacctgtcggagaaggtggtctacc

SEQ ID NO: 30262 - RNA, 67 nt, synthetic construct
  source 1..67: mol_type = other RNA
ctggctttcccccaggtttacatgttcctggtgaaatggcaggacctgtcggagaaggtggtatacc

SEQ ID NO: 30263 - RNA, 67 nt, synthetic construct
  source 1..67: mol_type = other RNA
ctggctttcccccaggtgtacatgttcctggtgaaatggcaggacctgtcggagaaggtggtgtacc

SEQ ID NO: 30264 - RNA, 67 nt, synthetic construct
  source 1..67: mol_type = other RNA
ctggctttcccccaggtctacatgttcctggtgaaatggcaggacctgtcggagaaggtggtttacc

SEQ ID NO: 30265 - RNA, 67 nt, synthetic construct
  source 1..67: mol_type = other RNA
ctggctttcccccaggtgtacatgttcctggtgaaatggcaggacctgtcggagaaggtggtctacc

SEQ ID NO: 30266 - RNA, 67 nt, synthetic construct
  source 1..67: mol_type = other RNA
ctggctttcccccaggtctacatgttcctggtgaaatggcaggacctgtcggagaaggtggtatacc

SEQ ID NO: 30267 - RNA, 67 nt, synthetic construct
  source 1..67: mol_type = other RNA
ctggctttcccccaggtatacatgttcctggtgaaatggcaggacctgtcggagaaggtggtttacc

SEQ ID NO: 30268 - RNA, 67 nt, synthetic construct
  source 1..67: mol_type = other RNA
ctggctttcccccaggtatacatgttcctggtgaaatggcaggacctgtcggagaaggtggtgtacc

SEQ ID NO: 30269 - RNA, 67 nt, synthetic construct
  source 1..67: mol_type = other RNA
ctggctttcccccaggtgtacatgttcctggtgaaatggcaggacctgtcggagaaggtggtttacc

SEQ ID NO: 30270 - RNA, 67 nt, synthetic construct
  source 1..67: mol_type = other RNA
ctggctttcccccaggtatacatgttcctggtgaaatggcaggacctgtcggagaaggtggtatacc

SEQ ID NO: 30271 - RNA, 67 nt, synthetic construct
  source 1..67: mol_type = other RNA
ctggctttcccccaggtttacatgttcctggtgaaatggcaggacctgtcggagaaggtggtttacc

SEQ ID NO: 30272 - RNA, 67 nt, synthetic construct
  source 1..67: mol_type = other RNA
ctggctttcccccaggtctacatgttcctggtgaaatggcaggacctgtcggagaaggtggtctacc

SEQ ID NO: 30273 - RNA, 67 nt, synthetic construct
  source 1..67: mol_type = other RNA
ctggctttcccccaggtctacatgttcctggtgaaatggcaggacctgtcggagaaggtggtgtacc

SEQ ID NO: 30274 - RNA, 67 nt, synthetic construct
  source 1..67: mol_type = other RNA
ctggctttcccccaggtgtacatgttcctggtgaaatggcaggacctgtcggagaaggtggtatacc

SEQ ID NO: 30275 - RNA, 67 nt, synthetic construct
  source 1..67: mol_type = other RNA
ctggctttcccccaggtatacatgttcctggtgaaatggcaggacctgtcggagaaggtggtctacc

SEQ ID NO: 30276 - RNA, 68 nt, synthetic construct
  source 1..68: mol_type = other RNA
tctggctttcccccaggtttacatgttcctggtgaaatggcaggacctgtcggagaaggtggtatacc

SEQ ID NO: 30277 - RNA, 68 nt, synthetic construct
  source 1..68: mol_type = other RNA
tctggctttcccccaggtctacatgttcctggtgaaatggcaggacctgtcggagaaggtggtctacc

SEQ ID NO: 30278 - RNA, 68 nt, synthetic construct
  source 1..68: mol_type = other RNA
tctggctttcccccaggtctacatgttcctggtgaaatggcaggacctgtcggagaaggtggtatacc

SEQ ID NO: 30279 - RNA, 68 nt, synthetic construct
  source 1..68: mol_type = other RNA
tctggctttcccccaggtatacatgttcctggtgaaatggcaggacctgtcggagaaggtggtgtacc

SEQ ID NO: 30280 - RNA, 68 nt, synthetic construct
  source 1..68: mol_type = other RNA
tctggctttcccccaggtatacatgttcctggtgaaatggcaggacctgtcggagaaggtggtctacc

SEQ ID NO: 30281 - RNA, 68 nt, synthetic construct
  source 1..68: mol_type = other RNA
tctggctttcccccaggtgtacatgttcctggtgaaatggcaggacctgtcggagaaggtggtctacc

SEQ ID NO: 30282 - RNA, 68 nt, synthetic construct
  source 1..68: mol_type = other RNA
tctggctttcccccaggtatacatgttcctggtgaaatggcaggacctgtcggagaaggtggtttacc

SEQ ID NO: 30283 - RNA, 68 nt, synthetic construct
  source 1..68: mol_type = other RNA
tctggctttcccccaggtctacatgttcctggtgaaatggcaggacctgtcggagaaggtggtttacc

SEQ ID NO: 30284 - RNA, 68 nt, synthetic construct
  source 1..68: mol_type = other RNA
tctggctttcccccaggtgtacatgttcctggtgaaatggcaggacctgtcggagaaggtggtatacc

SEQ ID NO: 30285 - RNA, 68 nt, synthetic construct
  source 1..68: mol_type = other RNA
tctggctttcccccaggtttacatgttcctggtgaaatggcaggacctgtcggagaaggtggtgtacc

SEQ ID NO: 30286 - RNA, 68 nt, synthetic construct
  source 1..68: mol_type = other RNA
tctggctttcccccaggtttacatgttcctggtgaaatggcaggacctgtcggagaaggtggtctacc

SEQ ID NO: 30287 - RNA, 68 nt, synthetic construct
  source 1..68: mol_type = other RNA
tctggctttcccccaggtctacatgttcctggtgaaatggcaggacctgtcggagaaggtggtgtacc

SEQ ID NO: 30288 - RNA, 68 nt, synthetic construct
  source 1..68: mol_type = other RNA
tctggctttcccccaggtgtacatgttcctggtgaaatggcaggacctgtcggagaaggtggtttacc

SEQ ID NO: 30289 - RNA, 68 nt, synthetic construct
  source 1..68: mol_type = other RNA
tctggctttcccccaggtatacatgttcctggtgaaatggcaggacctgtcggagaaggtggtatacc

SEQ ID NO: 30290 - RNA, 68 nt, synthetic construct
  source 1..68: mol_type = other RNA
tctggctttcccccaggtttacatgttcctggtgaaatggcaggacctgtcggagaaggtggtttacc

SEQ ID NO: 30291 - RNA, 68 nt, synthetic construct
  source 1..68: mol_type = other RNA
tctggctttcccccaggtgtacatgttcctggtgaaatggcaggacctgtcggagaaggtggtgtacc

SEQ ID NO: 30292 - RNA, 69 nt, synthetic construct
  source 1..69: mol_type = other RNA
ctctggctttcccccaggtctacatgttcctggtgaaatggcaggacctgtcggagaaggtggtttacc

SEQ ID NO: 30293 - RNA, 69 nt, synthetic construct
  source 1..69: mol_type = other RNA
ctctggctttcccccaggtatacatgttcctggtgaaatggcaggacctgtcggagaaggtggtttacc

SEQ ID NO: 30294 - RNA, 69 nt, synthetic construct
  source 1..69: mol_type = other RNA
ctctggctttcccccaggtatacatgttcctggtgaaatggcaggacctgtcggagaaggtggtctacc

SEQ ID NO: 30295 - RNA, 69 nt, synthetic construct
  source 1..69: mol_type = other RNA
ctctggctttcccccaggtatacatgttcctggtgaaatggcaggacctgtcggagaaggtggtatacc

SEQ ID NO: 30296 - RNA, 69 nt, synthetic construct
  source 1..69: mol_type = other RNA
ctctggctttcccccaggtgtacatgttcctggtgaaatggcaggacctgtcggagaaggtggtgtacc

SEQ ID NO: 30297 - RNA, 69 nt, synthetic construct
  source 1..69: mol_type = other RNA
ctctggctttcccccaggtttacatgttcctggtgaaatggcaggacctgtcggagaaggtggtctacc

SEQ ID NO: 30298 - RNA, 69 nt, synthetic construct
  source 1..69: mol_type = other RNA
ctctggctttcccccaggtctacatgttcctggtgaaatggcaggacctgtcggagaaggtggtatacc

SEQ ID NO: 30299 - RNA, 69 nt, synthetic construct
  source 1..69: mol_type = other RNA
ctctggctttcccccaggtttacatgttcctggtgaaatggcaggacctgtcggagaaggtggtttacc

SEQ ID NO: 30300 - RNA, 69 nt, synthetic construct
  source 1..69: mol_type = other RNA
ctctggctttcccccaggtttacatgttcctggtgaaatggcaggacctgtcggagaaggtggtgtacc

SEQ ID NO: 30301 - RNA, 69 nt, synthetic construct
  source 1..69: mol_type = other RNA
ctctggctttcccccaggtttacatgttcctggtgaaatggcaggacctgtcggagaaggtggtatacc

SEQ ID NO: 30302 - RNA, 69 nt, synthetic construct
  source 1..69: mol_type = other RNA
ctctggctttcccccaggtgtacatgttcctggtgaaatggcaggacctgtcggagaaggtggtttacc

SEQ ID NO: 30303 - RNA, 69 nt, synthetic construct
  source 1..69: mol_type = other RNA
ctctggctttcccccaggtgtacatgttcctggtgaaatggcaggacctgtcggagaaggtggtatacc

SEQ ID NO: 30304 - RNA, 69 nt, synthetic construct
  source 1..69: mol_type = other RNA
ctctggctttcccccaggtctacatgttcctggtgaaatggcaggacctgtcggagaaggtggtgtacc

SEQ ID NO: 30305 - RNA, 69 nt, synthetic construct
  source 1..69: mol_type = other RNA
ctctggctttcccccaggtgtacatgttcctggtgaaatggcaggacctgtcggagaaggtggtctacc

SEQ ID NO: 30306 - RNA, 69 nt, synthetic construct
  source 1..69: mol_type = other RNA
ctctggctttcccccaggtatacatgttcctggtgaaatggcaggacctgtcggagaaggtggtgtacc

SEQ ID NO: 30307 - RNA, 69 nt, synthetic construct
  source 1..69: mol_type = other RNA
ctctggctttcccccaggtctacatgttcctggtgaaatggcaggacctgtcggagaaggtggtctacc

SEQ ID NO: 30308 - RNA, 70 nt, synthetic construct
  source 1..70: mol_type = other RNA
actctggctttcccccaggtatacatgttcctggtgaaatggcaggacctgtcggagaaggtggtttacc

SEQ ID NO: 30309 - RNA, 70 nt, synthetic construct
  source 1..70: mol_type = other RNA
actctggctttcccccaggtctacatgttcctggtgaaatggcaggacctgtcggagaaggtggtatacc

SEQ ID NO: 30310 - RNA, 70 nt, synthetic construct
  source 1..70: mol_type = other RNA
actctggctttcccccaggtatacatgttcctggtgaaatggcaggacctgtcggagaaggtggtgtacc

SEQ ID NO: 30311 - RNA, 70 nt, synthetic construct
  source 1..70: mol_type = other RNA
actctggctttcccccaggtttacatgttcctggtgaaatggcaggacctgtcggagaaggtggtgtacc

SEQ ID NO: 30312 - RNA, 70 nt, synthetic construct
  source 1..70: mol_type = other RNA
actctggctttcccccaggtatacatgttcctggtgaaatggcaggacctgtcggagaaggtggtatacc

SEQ ID NO: 30313 - RNA, 70 nt, synthetic construct
  source 1..70: mol_type = other RNA
actctggctttcccccaggtctacatgttcctggtgaaatggcaggacctgtcggagaaggtggtgtacc

SEQ ID NO: 30314 - RNA, 70 nt, synthetic construct
  source 1..70: mol_type = other RNA
actctggctttcccccaggtctacatgttcctggtgaaatggcaggacctgtcggagaaggtggtctacc

SEQ ID NO: 30315 - RNA, 70 nt, synthetic construct
  source 1..70: mol_type = other RNA
actctggctttcccccaggtatacatgttcctggtgaaatggcaggacctgtcggagaaggtggtctacc

SEQ ID NO: 30316 - RNA, 70 nt, synthetic construct
  source 1..70: mol_type = other RNA
actctggctttcccccaggtctacatgttcctggtgaaatggcaggacctgtcggagaaggtggtttacc

SEQ ID NO: 30317 - RNA, 70 nt, synthetic construct
  source 1..70: mol_type = other RNA
actctggctttcccccaggtttacatgttcctggtgaaatggcaggacctgtcggagaaggtggtctacc

SEQ ID NO: 30318 - RNA, 70 nt, synthetic construct
  source 1..70: mol_type = other RNA
actctggctttcccccaggtgtacatgttcctggtgaaatggcaggacctgtcggagaaggtggtttacc

SEQ ID NO: 30319 - RNA, 70 nt, synthetic construct
  source 1..70: mol_type = other RNA
actctggctttcccccaggtttacatgttcctggtgaaatggcaggacctgtcggagaaggtggtatacc

SEQ ID NO: 30320 - RNA, 70 nt, synthetic construct
  source 1..70: mol_type = other RNA
actctggctttcccccaggtttacatgttcctggtgaaatggcaggacctgtcggagaaggtggtttacc

SEQ ID NO: 30321 - RNA, 70 nt, synthetic construct
  source 1..70: mol_type = other RNA
actctggctttcccccaggtgtacatgttcctggtgaaatggcaggacctgtcggagaaggtggtgtacc

SEQ ID NO: 30322 - RNA, 70 nt, synthetic construct
  source 1..70: mol_type = other RNA
actctggctttcccccaggtgtacatgttcctggtgaaatggcaggacctgtcggagaaggtggtatacc

SEQ ID NO: 30323 - RNA, 70 nt, synthetic construct
  source 1..70: mol_type = other RNA
actctggctttcccccaggtgtacatgttcctggtgaaatggcaggacctgtcggagaaggtggtctacc

SEQ ID NO: 30324 - RNA, 71 nt, synthetic construct
  source 1..71: mol_type = other RNA
gactctggctttcccccaggtgtacatgttcctggtgaaatggcaggacctgtcggagaaggtggtttacc

SEQ ID NO: 30325 - RNA, 71 nt, synthetic construct
  source 1..71: mol_type = other RNA
gactctggctttcccccaggtgtacatgttcctggtgaaatggcaggacctgtcggagaaggtggtctacc

SEQ ID NO: 30326 - RNA, 71 nt, synthetic construct
  source 1..71: mol_type = other RNA
gactctggctttcccccaggtttacatgttcctggtgaaatggcaggacctgtcggagaaggtggtttacc

SEQ ID NO: 30327 - RNA, 71 nt, synthetic construct
  source 1..71: mol_type = other RNA
gactctggctttcccccaggtttacatgttcctggtgaaatggcaggacctgtcggagaaggtggtgtacc

SEQ ID NO: 30328 - RNA, 71 nt, synthetic construct
  source 1..71: mol_type = other RNA
gactctggctttcccccaggtatacatgttcctggtgaaatggcaggacctgtcggagaaggtggtttacc

SEQ ID NO: 30329 - RNA, 71 nt, synthetic construct
  source 1..71: mol_type = other RNA
gactctggctttcccccaggtttacatgttcctggtgaaatggcaggacctgtcggagaaggtggtatacc

SEQ ID NO: 30330 - RNA, 71 nt, synthetic construct
  source 1..71: mol_type = other RNA
gactctggctttcccccaggtgtacatgttcctggtgaaatggcaggacctgtcggagaaggtggtgtacc

SEQ ID NO: 30331 - RNA, 71 nt, synthetic construct
  source 1..71: mol_type = other RNA
gactctggctttcccccaggtgtacatgttcctggtgaaatggcaggacctgtcggagaaggtggtatacc

SEQ ID NO: 30332 - RNA, 71 nt, synthetic construct
  source 1..71: mol_type = other RNA
gactctggctttcccccaggtatacatgttcctggtgaaatggcaggacctgtcggagaaggtggtctacc

SEQ ID NO: 30333 - RNA, 71 nt, synthetic construct
  source 1..71: mol_type = other RNA
gactctggctttcccccaggtctacatgttcctggtgaaatggcaggacctgtcggagaaggtggtttacc

SEQ ID NO: 30334 - RNA, 71 nt, synthetic construct
  source 1..71: mol_type = other RNA
gactctggctttcccccaggtctacatgttcctggtgaaatggcaggacctgtcggagaaggtggtgtacc

SEQ ID NO: 30335 - RNA, 71 nt, synthetic construct
  source 1..71: mol_type = other RNA
gactctggctttcccccaggtctacatgttcctggtgaaatggcaggacctgtcggagaaggtggtctacc

SEQ ID NO: 30336 - RNA, 71 nt, synthetic construct
  source 1..71: mol_type = other RNA
gactctggctttcccccaggtctacatgttcctggtgaaatggcaggacctgtcggagaaggtggtatacc

SEQ ID NO: 30337 - RNA, 71 nt, synthetic construct
  source 1..71: mol_type = other RNA
gactctggctttcccccaggtatacatgttcctggtgaaatggcaggacctgtcggagaaggtggtgtacc

SEQ ID NO: 30338 - RNA, 71 nt, synthetic construct
  source 1..71: mol_type = other RNA
gactctggctttcccccaggtatacatgttcctggtgaaatggcaggacctgtcggagaaggtggtatacc

SEQ ID NO: 30339 - RNA, 71 nt, synthetic construct
  source 1..71: mol_type = other RNA
gactctggctttcccccaggtttacatgttcctggtgaaatggcaggacctgtcggagaaggtggtctacc

SEQ ID NO: 30340 - RNA, 72 nt, synthetic construct
  source 1..72: mol_type = other RNA
cgactctggctttcccccaggtatacatgttcctggtgaaatggcaggacctgtcggagaaggtggtatacc

SEQ ID NO: 30341 - RNA, 72 nt, synthetic construct
  source 1..72: mol_type = other RNA
cgactctggctttcccccaggtctacatgttcctggtgaaatggcaggacctgtcggagaaggtggtgtacc

SEQ ID NO: 30342 - RNA, 72 nt, synthetic construct
  source 1..72: mol_type = other RNA
cgactctggctttcccccaggtatacatgttcctggtgaaatggcaggacctgtcggagaaggtggtgtacc

SEQ ID NO: 30343 - RNA, 72 nt, synthetic construct
  source 1..72: mol_type = other RNA
cgactctggctttcccccaggtatacatgttcctggtgaaatggcaggacctgtcggagaaggtggtttacc

SEQ ID NO: 30344 - RNA, 72 nt, synthetic construct
  source 1..72: mol_type = other RNA
cgactctggctttcccccaggtctacatgttcctggtgaaatggcaggacctgtcggagaaggtggtatacc

SEQ ID NO: 30345 - RNA, 72 nt, synthetic construct
  source 1..72: mol_type = other RNA
cgactctggctttcccccaggtctacatgttcctggtgaaatggcaggacctgtcggagaaggtggtctacc

SEQ ID NO: 30346 - RNA, 72 nt, synthetic construct
  source 1..72: mol_type = other RNA
cgactctggctttcccccaggtgtacatgttcctggtgaaatggcaggacctgtcggagaaggtggtgtacc

SEQ ID NO: 30347 - RNA, 72 nt, synthetic construct
  source 1..72: mol_type = other RNA
cgactctggctttcccccaggtgtacatgttcctggtgaaatggcaggacctgtcggagaaggtggtatacc

SEQ ID NO: 30348 - RNA, 72 nt, synthetic construct
  source 1..72: mol_type = other RNA
cgactctggctttcccccaggtttacatgttcctggtgaaatggcaggacctgtcggagaaggtggtctacc

SEQ ID NO: 30349 - RNA, 72 nt, synthetic construct
  source 1..72: mol_type = other RNA
cgactctggctttcccccaggtttacatgttcctggtgaaatggcaggacctgtcggagaaggtggtttacc

SEQ ID NO: 30350 - RNA, 72 nt, synthetic construct
  source 1..72: mol_type = other RNA
cgactctggctttcccccaggtttacatgttcctggtgaaatggcaggacctgtcggagaaggtggtgtacc

SEQ ID NO: 30351 - RNA, 72 nt, synthetic construct
  source 1..72: mol_type = other RNA
cgactctggctttcccccaggtatacatgttcctggtgaaatggcaggacctgtcggagaaggtggtctacc

SEQ ID NO: 30352 - RNA, 72 nt, synthetic construct
  source 1..72: mol_type = other RNA
cgactctggctttcccccaggtttacatgttcctggtgaaatggcaggacctgtcggagaaggtggtatacc

SEQ ID NO: 30353 - RNA, 72 nt, synthetic construct
  source 1..72: mol_type = other RNA
cgactctggctttcccccaggtgtacatgttcctggtgaaatggcaggacctgtcggagaaggtggtttacc

SEQ ID NO: 30354 - RNA, 72 nt, synthetic construct
  source 1..72: mol_type = other RNA
cgactctggctttcccccaggtctacatgttcctggtgaaatggcaggacctgtcggagaaggtggtttacc

SEQ ID NO: 30355 - RNA, 72 nt, synthetic construct
  source 1..72: mol_type = other RNA
cgactctggctttcccccaggtgtacatgttcctggtgaaatggcaggacctgtcggagaaggtggtctacc

SEQ ID NO: 30356 - RNA, 73 nt, synthetic construct
  source 1..73: mol_type = other RNA
ccgactctggctttcccccaggtttacatgttcctggtgaaatggcaggacctgtcggagaaggtggtctacc

SEQ ID NO: 30357 - RNA, 73 nt, synthetic construct
  source 1..73: mol_type = other RNA
ccgactctggctttcccccaggtttacatgttcctggtgaaatggcaggacctgtcggagaaggtggtttacc

SEQ ID NO: 30358 - RNA, 73 nt, synthetic construct
  source 1..73: mol_type = other RNA
ccgactctggctttcccccaggtttacatgttcctggtgaaatggcaggacctgtcggagaaggtggtatacc

SEQ ID NO: 30359 - RNA, 73 nt, synthetic construct
  source 1..73: mol_type = other RNA
ccgactctggctttcccccaggtgtacatgttcctggtgaaatggcaggacctgtcggagaaggtggtttacc

SEQ ID NO: 30360 - RNA, 73 nt, synthetic construct
  source 1..73: mol_type = other RNA
ccgactctggctttcccccaggtatacatgttcctggtgaaatggcaggacctgtcggagaaggtggtctacc

SEQ ID NO: 30361 - RNA, 73 nt, synthetic construct
  source 1..73: mol_type = other RNA
ccgactctggctttcccccaggtgtacatgttcctggtgaaatggcaggacctgtcggagaaggtggtgtacc

SEQ ID NO: 30362 - RNA, 73 nt, synthetic construct
  source 1..73: mol_type = other RNA
ccgactctggctttcccccaggtgtacatgttcctggtgaaatggcaggacctgtcggagaaggtggtctacc

SEQ ID NO: 30363 - RNA, 73 nt, synthetic construct
  source 1..73: mol_type = other RNA
ccgactctggctttcccccaggtgtacatgttcctggtgaaatggcaggacctgtcggagaaggtggtatacc

SEQ ID NO: 30364 - RNA, 73 nt, synthetic construct
  source 1..73: mol_type = other RNA
ccgactctggctttcccccaggtctacatgttcctggtgaaatggcaggacctgtcggagaaggtggtttacc

SEQ ID NO: 30365 - RNA, 73 nt, synthetic construct
  source 1..73: mol_type = other RNA
ccgactctggctttcccccaggtttacatgttcctggtgaaatggcaggacctgtcggagaaggtggtgtacc

SEQ ID NO: 30366 - RNA, 73 nt, synthetic construct
  source 1..73: mol_type = other RNA
ccgactctggctttcccccaggtctacatgttcctggtgaaatggcaggacctgtcggagaaggtggtatacc

SEQ ID NO: 30367 - RNA, 73 nt, synthetic construct
  source 1..73: mol_type = other RNA
ccgactctggctttcccccaggtatacatgttcctggtgaaatggcaggacctgtcggagaaggtggtttacc

SEQ ID NO: 30368 - RNA, 73 nt, synthetic construct
  source 1..73: mol_type = other RNA
ccgactctggctttcccccaggtatacatgttcctggtgaaatggcaggacctgtcggagaaggtggtgtacc

SEQ ID NO: 30369 - RNA, 73 nt, synthetic construct
  source 1..73: mol_type = other RNA
ccgactctggctttcccccaggtatacatgttcctggtgaaatggcaggacctgtcggagaaggtggtatacc

SEQ ID NO: 30370 - RNA, 73 nt, synthetic construct
  source 1..73: mol_type = other RNA
ccgactctggctttcccccaggtctacatgttcctggtgaaatggcaggacctgtcggagaaggtggtgtacc

SEQ ID NO: 30371 - RNA, 73 nt, synthetic construct
  source 1..73: mol_type = other RNA
ccgactctggctttcccccaggtctacatgttcctggtgaaatggcaggacctgtcggagaaggtggtctacc

SEQ ID NO: 30372 - RNA, 74 nt, synthetic construct
  source 1..74: mol_type = other RNA
cccgactctggctttcccccaggtctacatgttcctggtgaaatggcaggacctgtcggagaaggtggtgtacc

SEQ ID NO: 30373 - RNA, 74 nt, synthetic construct
  source 1..74: mol_type = other RNA
cccgactctggctttcccccaggtttacatgttcctggtgaaatggcaggacctgtcggagaaggtggtatacc

SEQ ID NO: 30374 - RNA, 74 nt, synthetic construct
  source 1..74: mol_type = other RNA
cccgactctggctttcccccaggtgtacatgttcctggtgaaatggcaggacctgtcggagaaggtggtctacc

SEQ ID NO: 30375 - RNA, 74 nt, synthetic construct
  source 1..74: mol_type = other RNA
cccgactctggctttcccccaggtgtacatgttcctggtgaaatggcaggacctgtcggagaaggtggtgtacc

SEQ ID NO: 30376 - RNA, 74 nt, synthetic construct
  source 1..74: mol_type = other RNA
cccgactctggctttcccccaggtgtacatgttcctggtgaaatggcaggacctgtcggagaaggtggtttacc

SEQ ID NO: 30377 - RNA, 74 nt, synthetic construct
  source 1..74: mol_type = other RNA
cccgactctggctttcccccaggtttacatgttcctggtgaaatggcaggacctgtcggagaaggtggtctacc

SEQ ID NO: 30378 - RNA, 74 nt, synthetic construct
  source 1..74: mol_type = other RNA
cccgactctggctttcccccaggtttacatgttcctggtgaaatggcaggacctgtcggagaaggtggtgtacc

SEQ ID NO: 30379 - RNA, 74 nt, synthetic construct
  source 1..74: mol_type = other RNA
cccgactctggctttcccccaggtttacatgttcctggtgaaatggcaggacctgtcggagaaggtggtttacc

SEQ ID NO: 30380 - RNA, 74 nt, synthetic construct
  source 1..74: mol_type = other RNA
cccgactctggctttcccccaggtatacatgttcctggtgaaatggcaggacctgtcggagaaggtggtctacc

SEQ ID NO: 30381 - RNA, 74 nt, synthetic construct
  source 1..74: mol_type = other RNA
cccgactctggctttcccccaggtctacatgttcctggtgaaatggcaggacctgtcggagaaggtggtctacc

SEQ ID NO: 30382 - RNA, 74 nt, synthetic construct
  source 1..74: mol_type = other RNA
cccgactctggctttcccccaggtatacatgttcctggtgaaatggcaggacctgtcggagaaggtggtatacc

SEQ ID NO: 30383 - RNA, 74 nt, synthetic construct
  source 1..74: mol_type = other RNA
cccgactctggctttcccccaggtctacatgttcctggtgaaatggcaggacctgtcggagaaggtggtttacc

SEQ ID NO: 30384 - RNA, 74 nt, synthetic construct
  source 1..74: mol_type = other RNA
cccgactctggctttcccccaggtctacatgttcctggtgaaatggcaggacctgtcggagaaggtggtatacc

SEQ ID NO: 30385 - RNA, 74 nt, synthetic construct
  source 1..74: mol_type = other RNA
cccgactctggctttcccccaggtatacatgttcctggtgaaatggcaggacctgtcggagaaggtggtttacc

SEQ ID NO: 30386 - RNA, 74 nt, synthetic construct
  source 1..74: mol_type = other RNA
cccgactctggctttcccccaggtatacatgttcctggtgaaatggcaggacctgtcggagaaggtggtgtacc

SEQ ID NO: 30387 - RNA, 74 nt, synthetic construct
  source 1..74: mol_type = other RNA
cccgactctggctttcccccaggtgtacatgttcctggtgaaatggcaggacctgtcggagaaggtggtatacc

SEQ ID NO: 30388 - RNA, 75 nt, synthetic construct
  source 1..75: mol_type = other RNA
ccccgactctggctttcccccaggtgtacatgttcctggtgaaatggcaggacctgtcggagaaggtggtgtacc

SEQ ID NO: 30389 - RNA, 75 nt, synthetic construct
  source 1..75: mol_type = other RNA
ccccgactctggctttcccccaggtgtacatgttcctggtgaaatggcaggacctgtcggagaaggtggtttacc

SEQ ID NO: 30390 - RNA, 75 nt, synthetic construct
  source 1..75: mol_type = other RNA
ccccgactctggctttcccccaggtttacatgttcctggtgaaatggcaggacctgtcggagaaggtggtctacc

SEQ ID NO: 30391 - RNA, 75 nt, synthetic construct
  source 1..75: mol_type = other RNA
ccccgactctggctttcccccaggtatacatgttcctggtgaaatggcaggacctgtcggagaaggtggtttacc

SEQ ID NO: 30392 - RNA, 75 nt, synthetic construct
  source 1..75: mol_type = other RNA
ccccgactctggctttcccccaggtttacatgttcctggtgaaatggcaggacctgtcggagaaggtggtatacc

SEQ ID NO: 30393 - RNA, 75 nt, synthetic construct
  source 1..75: mol_type = other RNA
ccccgactctggctttcccccaggtatacatgttcctggtgaaatggcaggacctgtcggagaaggtggtctacc

SEQ ID NO: 30394 - RNA, 75 nt, synthetic construct
  source 1..75: mol_type = other RNA
ccccgactctggctttcccccaggtctacatgttcctggtgaaatggcaggacctgtcggagaaggtggtgtacc

SEQ ID NO: 30395 - RNA, 75 nt, synthetic construct
  source 1..75: mol_type = other RNA
ccccgactctggctttcccccaggtatacatgttcctggtgaaatggcaggacctgtcggagaaggtggtatacc

SEQ ID NO: 30396 - RNA, 75 nt, synthetic construct
  source 1..75: mol_type = other RNA
ccccgactctggctttcccccaggtttacatgttcctggtgaaatggcaggacctgtcggagaaggtggtgtacc

SEQ ID NO: 30397 - RNA, 75 nt, synthetic construct
  source 1..75: mol_type = other RNA
ccccgactctggctttcccccaggtatacatgttcctggtgaaatggcaggacctgtcggagaaggtggtgtacc

SEQ ID NO: 30398 - RNA, 75 nt, synthetic construct
  source 1..75: mol_type = other RNA
ccccgactctggctttcccccaggtgtacatgttcctggtgaaatggcaggacctgtcggagaaggtggtatacc

SEQ ID NO: 30399 - RNA, 75 nt, synthetic construct
  source 1..75: mol_type = other RNA
ccccgactctggctttcccccaggtctacatgttcctggtgaaatggcaggacctgtcggagaaggtggtctacc

SEQ ID NO: 30400 - RNA, 75 nt, synthetic construct
  source 1..75: mol_type = other RNA
ccccgactctggctttcccccaggtttacatgttcctggtgaaatggcaggacctgtcggagaaggtggtttacc

SEQ ID NO: 30401 - RNA, 75 nt, synthetic construct
  source 1..75: mol_type = other RNA
ccccgactctggctttcccccaggtctacatgttcctggtgaaatggcaggacctgtcggagaaggtggtttacc

SEQ ID NO: 30402 - RNA, 75 nt, synthetic construct
  source 1..75: mol_type = other RNA
ccccgactctggctttcccccaggtgtacatgttcctggtgaaatggcaggacctgtcggagaaggtggtctacc

SEQ ID NO: 30403 - RNA, 75 nt, synthetic construct
  source 1..75: mol_type = other RNA
ccccgactctggctttcccccaggtctacatgttcctggtgaaatggcaggacctgtcggagaaggtggtatacc

SEQ ID NO: 30404 - RNA, 76 nt, synthetic construct
  source 1..76: mol_type = other RNA
cccccgactctggctttcccccaggtttacatgttcctggtgaaatggcaggacctgtcggagaaggtggtttacc

SEQ ID NO: 30405 - RNA, 76 nt, synthetic construct
  source 1..76: mol_type = other RNA
cccccgactctggctttcccccaggtctacatgttcctggtgaaatggcaggacctgtcggagaaggtggtttacc

SEQ ID NO: 30406 - RNA, 76 nt, synthetic construct
  source 1..76: mol_type = other RNA
cccccgactctggctttcccccaggtatacatgttcctggtgaaatggcaggacctgtcggagaaggtggtctacc

SEQ ID NO: 30407 - RNA, 76 nt, synthetic construct
  source 1..76: mol_type = other RNA
cccccgactctggctttcccccaggtatacatgttcctggtgaaatggcaggacctgtcggagaaggtggtgtacc

SEQ ID NO: 30408 - RNA, 76 nt, synthetic construct
  source 1..76: mol_type = other RNA
cccccgactctggctttcccccaggtatacatgttcctggtgaaatggcaggacctgtcggagaaggtggtttacc

SEQ ID NO: 30409 - RNA, 76 nt, synthetic construct
  source 1..76: mol_type = other RNA
cccccgactctggctttcccccaggtctacatgttcctggtgaaatggcaggacctgtcggagaaggtggtatacc

SEQ ID NO: 30410 - RNA, 76 nt, synthetic construct
  source 1..76: mol_type = other RNA
cccccgactctggctttcccccaggtttacatgttcctggtgaaatggcaggacctgtcggagaaggtggtgtacc

SEQ ID NO: 30411 - RNA, 76 nt, synthetic construct
  source 1..76: mol_type = other RNA
cccccgactctggctttcccccaggtctacatgttcctggtgaaatggcaggacctgtcggagaaggtggtctacc

SEQ ID NO: 30412 - RNA, 76 nt, synthetic construct
  source 1..76: mol_type = other RNA
cccccgactctggctttcccccaggtgtacatgttcctggtgaaatggcaggacctgtcggagaaggtggtctacc

SEQ ID NO: 30413 - RNA, 76 nt, synthetic construct
  source 1..76: mol_type = other RNA
cccccgactctggctttcccccaggtgtacatgttcctggtgaaatggcaggacctgtcggagaaggtggtatacc

SEQ ID NO: 30414 - RNA, 76 nt, synthetic construct
  source 1..76: mol_type = other RNA
cccccgactctggctttcccccaggtgtacatgttcctggtgaaatggcaggacctgtcggagaaggtggtgtacc

SEQ ID NO: 30415 - RNA, 76 nt, synthetic construct
  source 1..76: mol_type = other RNA
cccccgactctggctttcccccaggtttacatgttcctggtgaaatggcaggacctgtcggagaaggtggtatacc

SEQ ID NO: 30416 - RNA, 76 nt, synthetic construct
  source 1..76: mol_type = other RNA
cccccgactctggctttcccccaggtatacatgttcctggtgaaatggcaggacctgtcggagaaggtggtatacc

SEQ ID NO: 30417 - RNA, 76 nt, synthetic construct
  source 1..76: mol_type = other RNA
cccccgactctggctttcccccaggtctacatgttcctggtgaaatggcaggacctgtcggagaaggtggtgtacc

SEQ ID NO: 30418 - RNA, 76 nt, synthetic construct
  source 1..76: mol_type = other RNA
cccccgactctggctttcccccaggtgtacatgttcctggtgaaatggcaggacctgtcggagaaggtggtttacc

SEQ ID NO: 30419 - RNA, 76 nt, synthetic construct
  source 1..76: mol_type = other RNA
cccccgactctggctttcccccaggtttacatgttcctggtgaaatggcaggacctgtcggagaaggtggtctacc

SEQ ID NO: 30420 - RNA, 77 nt, synthetic construct
  source 1..77: mol_type = other RNA
tcccccgactctggctttcccccaggtttacatgttcctggtgaaatggcaggacctgtcggagaaggtggtctacc

SEQ ID NO: 30421 - RNA, 77 nt, synthetic construct
  source 1..77: mol_type = other RNA
tcccccgactctggctttcccccaggtgtacatgttcctggtgaaatggcaggacctgtcggagaaggtggtttacc

SEQ ID NO: 30422 - RNA, 77 nt, synthetic construct
  source 1..77: mol_type = other RNA
tcccccgactctggctttcccccaggtctacatgttcctggtgaaatggcaggacctgtcggagaaggtggtttacc

SEQ ID NO: 30423 - RNA, 77 nt, synthetic construct
  source 1..77: mol_type = other RNA
tcccccgactctggctttcccccaggtttacatgttcctggtgaaatggcaggacctgtcggagaaggtggtttacc

SEQ ID NO: 30424 - RNA, 77 nt, synthetic construct
  source 1..77: mol_type = other RNA
tcccccgactctggctttcccccaggtatacatgttcctggtgaaatggcaggacctgtcggagaaggtggtttacc

SEQ ID NO: 30425 - RNA, 77 nt, synthetic construct
  source 1..77: mol_type = other RNA
tcccccgactctggctttcccccaggtgtacatgttcctggtgaaatggcaggacctgtcggagaaggtggtctacc

SEQ ID NO: 30426 - RNA, 77 nt, synthetic construct
  source 1..77: mol_type = other RNA
tcccccgactctggctttcccccaggtctacatgttcctggtgaaatggcaggacctgtcggagaaggtggtctacc

SEQ ID NO: 30427 - RNA, 77 nt, synthetic construct
  source 1..77: mol_type = other RNA
tcccccgactctggctttcccccaggtatacatgttcctggtgaaatggcaggacctgtcggagaaggtggtatacc

SEQ ID NO: 30428 - RNA, 77 nt, synthetic construct
  source 1..77: mol_type = other RNA
tcccccgactctggctttcccccaggtttacatgttcctggtgaaatggcaggacctgtcggagaaggtggtgtacc

SEQ ID NO: 30429 - RNA, 77 nt, synthetic construct
  source 1..77: mol_type = other RNA
tcccccgactctggctttcccccaggtttacatgttcctggtgaaatggcaggacctgtcggagaaggtggtatacc

SEQ ID NO: 30430 - RNA, 77 nt, synthetic construct
  source 1..77: mol_type = other RNA
tcccccgactctggctttcccccaggtgtacatgttcctggtgaaatggcaggacctgtcggagaaggtggtatacc

SEQ ID NO: 30431 - RNA, 77 nt, synthetic construct
  source 1..77: mol_type = other RNA
tcccccgactctggctttcccccaggtatacatgttcctggtgaaatggcaggacctgtcggagaaggtggtctacc

SEQ ID NO: 30432 - RNA, 77 nt, synthetic construct
  source 1..77: mol_type = other RNA
tcccccgactctggctttcccccaggtatacatgttcctggtgaaatggcaggacctgtcggagaaggtggtgtacc

SEQ ID NO: 30433 - RNA, 77 nt, synthetic construct
  source 1..77: mol_type = other RNA
tcccccgactctggctttcccccaggtctacatgttcctggtgaaatggcaggacctgtcggagaaggtggtatacc

SEQ ID NO: 30434 - RNA, 77 nt, synthetic construct
  source 1..77: mol_type = other RNA
tcccccgactctggctttcccccaggtgtacatgttcctggtgaaatggcaggacctgtcggagaaggtggtgtacc

SEQ ID NO: 30435 - RNA, 77 nt, synthetic construct
  source 1..77: mol_type = other RNA
tcccccgactctggctttcccccaggtctacatgttcctggtgaaatggcaggacctgtcggagaaggtggtgtacc

SEQ ID NO: 30436 - RNA, 78 nt, synthetic construct
  source 1..78: mol_type = other RNA
gtcccccgactctggctttcccccaggtgtacatgttcctggtgaaatggcaggacctgtcggagaaggtggtgtacc

SEQ ID NO: 30437 - RNA, 78 nt, synthetic construct
  source 1..78: mol_type = other RNA
gtcccccgactctggctttcccccaggtttacatgttcctggtgaaatggcaggacctgtcggagaaggtggtttacc

SEQ ID NO: 30438 - RNA, 78 nt, synthetic construct
  source 1..78: mol_type = other RNA
gtcccccgactctggctttcccccaggtgtacatgttcctggtgaaatggcaggacctgtcggagaaggtggtctacc

SEQ ID NO: 30439 - RNA, 78 nt, synthetic construct
  source 1..78: mol_type = other RNA
gtcccccgactctggctttcccccaggtttacatgttcctggtgaaatggcaggacctgtcggagaaggtggtgtacc

SEQ ID NO: 30440 - RNA, 78 nt, synthetic construct
  source 1..78: mol_type = other RNA
gtcccccgactctggctttcccccaggtgtacatgttcctggtgaaatggcaggacctgtcggagaaggtggtatacc

SEQ ID NO: 30441 - RNA, 78 nt, synthetic construct
  source 1..78: mol_type = other RNA
gtcccccgactctggctttcccccaggtttacatgttcctggtgaaatggcaggacctgtcggagaaggtggtatacc

SEQ ID NO: 30442 - RNA, 78 nt, synthetic construct
  source 1..78: mol_type = other RNA
gtcccccgactctggctttcccccaggtctacatgttcctggtgaaatggcaggacctgtcggagaaggtggtgtacc

SEQ ID NO: 30443 - RNA, 78 nt, synthetic construct
  source 1..78: mol_type = other RNA
gtcccccgactctggctttcccccaggtctacatgttcctggtgaaatggcaggacctgtcggagaaggtggtctacc

SEQ ID NO: 30444 - RNA, 78 nt, synthetic construct
  source 1..78: mol_type = other RNA
gtcccccgactctggctttcccccaggtatacatgttcctggtgaaatggcaggacctgtcggagaaggtggtatacc

SEQ ID NO: 30445 - RNA, 78 nt, synthetic construct
  source 1..78: mol_type = other RNA
gtcccccgactctggctttcccccaggtatacatgttcctggtgaaatggcaggacctgtcggagaaggtggtctacc

SEQ ID NO: 30446 - RNA, 78 nt, synthetic construct
  source 1..78: mol_type = other RNA
gtcccccgactctggctttcccccaggtatacatgttcctggtgaaatggcaggacctgtcggagaaggtggtgtacc

SEQ ID NO: 30447 - RNA, 78 nt, synthetic construct
  source 1..78: mol_type = other RNA
gtcccccgactctggctttcccccaggtatacatgttcctggtgaaatggcaggacctgtcggagaaggtggtttacc

SEQ ID NO: 30448 - RNA, 78 nt, synthetic construct
  source 1..78: mol_type = other RNA
gtcccccgactctggctttcccccaggtctacatgttcctggtgaaatggcaggacctgtcggagaaggtggtttacc

SEQ ID NO: 30449 - RNA, 78 nt, synthetic construct
  source 1..78: mol_type = other RNA
gtcccccgactctggctttcccccaggtttacatgttcctggtgaaatggcaggacctgtcggagaaggtggtctacc

SEQ ID NO: 30450 - RNA, 78 nt, synthetic construct
  source 1..78: mol_type = other RNA
gtcccccgactctggctttcccccaggtgtacatgttcctggtgaaatggcaggacctgtcggagaaggtggtttacc

SEQ ID NO: 30451 - RNA, 78 nt, synthetic construct
  source 1..78: mol_type = other RNA
gtcccccgactctggctttcccccaggtctacatgttcctggtgaaatggcaggacctgtcggagaaggtggtatacc

SEQ ID NO: 30452 - RNA, 79 nt, synthetic construct
  source 1..79: mol_type = other RNA
ggtcccccgactctggctttcccccaggtgtacatgttcctggtgaaatggcaggacctgtcggagaaggtggtttacc

SEQ ID NO: 30453 - RNA, 79 nt, synthetic construct
  source 1..79: mol_type = other RNA
ggtcccccgactctggctttcccccaggtatacatgttcctggtgaaatggcaggacctgtcggagaaggtggtttacc

SEQ ID NO: 30454 - RNA, 79 nt, synthetic construct
  source 1..79: mol_type = other RNA
ggtcccccgactctggctttcccccaggtgtacatgttcctggtgaaatggcaggacctgtcggagaaggtggtatacc

SEQ ID NO: 30455 - RNA, 79 nt, synthetic construct
  source 1..79: mol_type = other RNA
ggtcccccgactctggctttcccccaggtatacatgttcctggtgaaatggcaggacctgtcggagaaggtggtatacc

SEQ ID NO: 30456 - RNA, 79 nt, synthetic construct
  source 1..79: mol_type = other RNA
ggtcccccgactctggctttcccccaggtatacatgttcctggtgaaatggcaggacctgtcggagaaggtggtctacc

SEQ ID NO: 30457 - RNA, 79 nt, synthetic construct
  source 1..79: mol_type = other RNA
ggtcccccgactctggctttcccccaggtatacatgttcctggtgaaatggcaggacctgtcggagaaggtggtgtacc

SEQ ID NO: 30458 - RNA, 79 nt, synthetic construct
  source 1..79: mol_type = other RNA
ggtcccccgactctggctttcccccaggtctacatgttcctggtgaaatggcaggacctgtcggagaaggtggtatacc

SEQ ID NO: 30459 - RNA, 79 nt, synthetic construct
  source 1..79: mol_type = other RNA
ggtcccccgactctggctttcccccaggtctacatgttcctggtgaaatggcaggacctgtcggagaaggtggtctacc

SEQ ID NO: 30460 - RNA, 79 nt, synthetic construct
  source 1..79: mol_type = other RNA
ggtcccccgactctggctttcccccaggtctacatgttcctggtgaaatggcaggacctgtcggagaaggtggtgtacc

SEQ ID NO: 30461 - RNA, 79 nt, synthetic construct
  source 1..79: mol_type = other RNA
ggtcccccgactctggctttcccccaggtgtacatgttcctggtgaaatggcaggacctgtcggagaaggtggtctacc

SEQ ID NO: 30462 - RNA, 79 nt, synthetic construct
  source 1..79: mol_type = other RNA
ggtcccccgactctggctttcccccaggtgtacatgttcctggtgaaatggcaggacctgtcggagaaggtggtgtacc

SEQ ID NO: 30463 - RNA, 79 nt, synthetic construct
  source 1..79: mol_type = other RNA
ggtcccccgactctggctttcccccaggtttacatgttcctggtgaaatggcaggacctgtcggagaaggtggtatacc

SEQ ID NO: 30464 - RNA, 79 nt, synthetic construct
  source 1..79: mol_type = other RNA
ggtcccccgactctggctttcccccaggtttacatgttcctggtgaaatggcaggacctgtcggagaaggtggtctacc

SEQ ID NO: 30465 - RNA, 79 nt, synthetic construct
  source 1..79: mol_type = other RNA
ggtcccccgactctggctttcccccaggtttacatgttcctggtgaaatggcaggacctgtcggagaaggtggtgtacc

SEQ ID NO: 30466 - RNA, 79 nt, synthetic construct
  source 1..79: mol_type = other RNA
ggtcccccgactctggctttcccccaggtttacatgttcctggtgaaatggcaggacctgtcggagaaggtggtttacc

SEQ ID NO: 30467 - RNA, 79 nt, synthetic construct
  source 1..79: mol_type = other RNA
ggtcccccgactctggctttcccccaggtctacatgttcctggtgaaatggcaggacctgtcggagaaggtggtttacc

SEQ ID NO: 30468 - RNA, 80 nt, synthetic construct
  source 1..80: mol_type = other RNA
gggtcccccgactctggctttcccccaggtgtacatgttcctggtgaaatggcaggacctgtcggagaaggtggtgtacc

SEQ ID NO: 30469 - RNA, 80 nt, synthetic construct
  source 1..80: mol_type = other RNA
gggtcccccgactctggctttcccccaggtttacatgttcctggtgaaatggcaggacctgtcggagaaggtggtatacc

SEQ ID NO: 30470 - RNA, 80 nt, synthetic construct
  source 1..80: mol_type = other RNA
gggtcccccgactctggctttcccccaggtgtacatgttcctggtgaaatggcaggacctgtcggagaaggtggtctacc

SEQ ID NO: 30471 - RNA, 80 nt, synthetic construct
  source 1..80: mol_type = other RNA
gggtcccccgactctggctttcccccaggtttacatgttcctggtgaaatggcaggacctgtcggagaaggtggtttacc

SEQ ID NO: 30472 - RNA, 80 nt, synthetic construct
  source 1..80: mol_type = other RNA
gggtcccccgactctggctttcccccaggtgtacatgttcctggtgaaatggcaggacctgtcggagaaggtggtttacc

SEQ ID NO: 30473 - RNA, 80 nt, synthetic construct
  source 1..80: mol_type = other RNA
gggtcccccgactctggctttcccccaggtttacatgttcctggtgaaatggcaggacctgtcggagaaggtggtctacc

SEQ ID NO: 30474 - RNA, 80 nt, synthetic construct
  source 1..80: mol_type = other RNA
gggtcccccgactctggctttcccccaggtgtacatgttcctggtgaaatggcaggacctgtcggagaaggtggtatacc

SEQ ID NO: 30475 - RNA, 80 nt, synthetic construct
  source 1..80: mol_type = other RNA
gggtcccccgactctggctttcccccaggtttacatgttcctggtgaaatggcaggacctgtcggagaaggtggtgtacc

SEQ ID NO: 30476 - RNA, 80 nt, synthetic construct
  source 1..80: mol_type = other RNA
gggtcccccgactctggctttcccccaggtatacatgttcctggtgaaatggcaggacctgtcggagaaggtggtttacc

SEQ ID NO: 30477 - RNA, 80 nt, synthetic construct
  source 1..80: mol_type = other RNA
gggtcccccgactctggctttcccccaggtctacatgttcctggtgaaatggcaggacctgtcggagaaggtggtgtacc

SEQ ID NO: 30478 - RNA, 80 nt, synthetic construct
  source 1..80: mol_type = other RNA
gggtcccccgactctggctttcccccaggtctacatgttcctggtgaaatggcaggacctgtcggagaaggtggtttacc

SEQ ID NO: 30479 - RNA, 80 nt, synthetic construct
  source 1..80: mol_type = other RNA
gggtcccccgactctggctttcccccaggtctacatgttcctggtgaaatggcaggacctgtcggagaaggtggtatacc

SEQ ID NO: 30480 - RNA, 80 nt, synthetic construct
  source 1..80: mol_type = other RNA
gggtcccccgactctggctttcccccaggtatacatgttcctggtgaaatggcaggacctgtcggagaaggtggtgtacc

SEQ ID NO: 30481 - RNA, 80 nt, synthetic construct
  source 1..80: mol_type = other RNA
gggtcccccgactctggctttcccccaggtatacatgttcctggtgaaatggcaggacctgtcggagaaggtggtctacc

SEQ ID NO: 30482 - RNA, 80 nt, synthetic construct
  source 1..80: mol_type = other RNA
gggtcccccgactctggctttcccccaggtatacatgttcctggtgaaatggcaggacctgtcggagaaggtggtatacc

SEQ ID NO: 30483 - RNA, 80 nt, synthetic construct
  source 1..80: mol_type = other RNA
gggtcccccgactctggctttcccccaggtctacatgttcctggtgaaatggcaggacctgtcggagaaggtggtctacc

SEQ ID NO: 30484 - RNA, 81 nt, synthetic construct
  source 1..81: mol_type = other RNA
ggggtcccccgactctggctttcccccaggtatacatgttcctggtgaaatggcaggacctgtcggagaaggtggtgtacc

SEQ ID NO: 30485 - RNA, 81 nt, synthetic construct
  source 1..81: mol_type = other RNA
ggggtcccccgactctggctttcccccaggtctacatgttcctggtgaaatggcaggacctgtcggagaaggtggtatacc

SEQ ID NO: 30486 - RNA, 81 nt, synthetic construct
  source 1..81: mol_type = other RNA
ggggtcccccgactctggctttcccccaggtctacatgttcctggtgaaatggcaggacctgtcggagaaggtggtgtacc

SEQ ID NO: 30487 - RNA, 81 nt, synthetic construct
  source 1..81: mol_type = other RNA
ggggtcccccgactctggctttcccccaggtgtacatgttcctggtgaaatggcaggacctgtcggagaaggtggtctacc

SEQ ID NO: 30488 - RNA, 81 nt, synthetic construct
  source 1..81: mol_type = other RNA
ggggtcccccgactctggctttcccccaggtgtacatgttcctggtgaaatggcaggacctgtcggagaaggtggtatacc

SEQ ID NO: 30489 - RNA, 81 nt, synthetic construct
  source 1..81: mol_type = other RNA
ggggtcccccgactctggctttcccccaggtgtacatgttcctggtgaaatggcaggacctgtcggagaaggtggtgtacc

SEQ ID NO: 30490 - RNA, 81 nt, synthetic construct
  source 1..81: mol_type = other RNA
ggggtcccccgactctggctttcccccaggtttacatgttcctggtgaaatggcaggacctgtcggagaaggtggtatacc

SEQ ID NO: 30491 - RNA, 81 nt, synthetic construct
  source 1..81: mol_type = other RNA
ggggtcccccgactctggctttcccccaggtttacatgttcctggtgaaatggcaggacctgtcggagaaggtggtctacc

SEQ ID NO: 30492 - RNA, 81 nt, synthetic construct
  source 1..81: mol_type = other RNA
ggggtcccccgactctggctttcccccaggtttacatgttcctggtgaaatggcaggacctgtcggagaaggtggtgtacc

SEQ ID NO: 30493 - RNA, 81 nt, synthetic construct
  source 1..81: mol_type = other RNA
ggggtcccccgactctggctttcccccaggtttacatgttcctggtgaaatggcaggacctgtcggagaaggtggtttacc

SEQ ID NO: 30494 - RNA, 81 nt, synthetic construct
  source 1..81: mol_type = other RNA
ggggtcccccgactctggctttcccccaggtatacatgttcctggtgaaatggcaggacctgtcggagaaggtggtttacc

SEQ ID NO: 30495 - RNA, 81 nt, synthetic construct
  source 1..81: mol_type = other RNA
ggggtcccccgactctggctttcccccaggtatacatgttcctggtgaaatggcaggacctgtcggagaaggtggtctacc

SEQ ID NO: 30496 - RNA, 81 nt, synthetic construct
  source 1..81: mol_type = other RNA
ggggtcccccgactctggctttcccccaggtatacatgttcctggtgaaatggcaggacctgtcggagaaggtggtatacc

SEQ ID NO: 30497 - RNA, 81 nt, synthetic construct
  source 1..81: mol_type = other RNA
ggggtcccccgactctggctttcccccaggtctacatgttcctggtgaaatggcaggacctgtcggagaaggtggtttacc

SEQ ID NO: 30498 - RNA, 81 nt, synthetic construct
  source 1..81: mol_type = other RNA
ggggtcccccgactctggctttcccccaggtctacatgttcctggtgaaatggcaggacctgtcggagaaggtggtctacc

SEQ ID NO: 30499 - RNA, 81 nt, synthetic construct
  source 1..81: mol_type = other RNA
ggggtcccccgactctggctttcccccaggtgtacatgttcctggtgaaatggcaggacctgtcggagaaggtggtttacc

SEQ ID NO: 30500 - RNA, 82 nt, synthetic construct
  source 1..82: mol_type = other RNA
tggggtcccccgactctggctttcccccaggtgtacatgttcctggtgaaatggcaggacctgtcggagaaggtggtctacc

SEQ ID NO: 30501 - RNA, 82 nt, synthetic construct
  source 1..82: mol_type = other RNA
tggggtcccccgactctggctttcccccaggtatacatgttcctggtgaaatggcaggacctgtcggagaaggtggtgtacc

SEQ ID NO: 30502 - RNA, 82 nt, synthetic construct
  source 1..82: mol_type = other RNA
tggggtcccccgactctggctttcccccaggtttacatgttcctggtgaaatggcaggacctgtcggagaaggtggtttacc

SEQ ID NO: 30503 - RNA, 82 nt, synthetic construct
  source 1..82: mol_type = other RNA
tggggtcccccgactctggctttcccccaggtgtacatgttcctggtgaaatggcaggacctgtcggagaaggtggtatacc

SEQ ID NO: 30504 - RNA, 82 nt, synthetic construct
  source 1..82: mol_type = other RNA
tggggtcccccgactctggctttcccccaggtatacatgttcctggtgaaatggcaggacctgtcggagaaggtggtctacc

SEQ ID NO: 30505 - RNA, 82 nt, synthetic construct
  source 1..82: mol_type = other RNA
tggggtcccccgactctggctttcccccaggtctacatgttcctggtgaaatggcaggacctgtcggagaaggtggtatacc

SEQ ID NO: 30506 - RNA, 82 nt, synthetic construct
  source 1..82: mol_type = other RNA
tggggtcccccgactctggctttcccccaggtctacatgttcctggtgaaatggcaggacctgtcggagaaggtggtctacc

SEQ ID NO: 30507 - RNA, 82 nt, synthetic construct
  source 1..82: mol_type = other RNA
tggggtcccccgactctggctttcccccaggtctacatgttcctggtgaaatggcaggacctgtcggagaaggtggtgtacc

SEQ ID NO: 30508 - RNA, 82 nt, synthetic construct
  source 1..82: mol_type = other RNA
tggggtcccccgactctggctttcccccaggtgtacatgttcctggtgaaatggcaggacctgtcggagaaggtggtttacc

SEQ ID NO: 30509 - RNA, 82 nt, synthetic construct
  source 1..82: mol_type = other RNA
tggggtcccccgactctggctttcccccaggtatacatgttcctggtgaaatggcaggacctgtcggagaaggtggtttacc

SEQ ID NO: 30510 - RNA, 82 nt, synthetic construct
  source 1..82: mol_type = other RNA
tggggtcccccgactctggctttcccccaggtgtacatgttcctggtgaaatggcaggacctgtcggagaaggtggtgtacc

SEQ ID NO: 30511 - RNA, 82 nt, synthetic construct
  source 1..82: mol_type = other RNA
tggggtcccccgactctggctttcccccaggtttacatgttcctggtgaaatggcaggacctgtcggagaaggtggtatacc

SEQ ID NO: 30512 - RNA, 82 nt, synthetic construct
  source 1..82: mol_type = other RNA
tggggtcccccgactctggctttcccccaggtttacatgttcctggtgaaatggcaggacctgtcggagaaggtggtctacc

SEQ ID NO: 30513 - RNA, 82 nt, synthetic construct
  source 1..82: mol_type = other RNA
tggggtcccccgactctggctttcccccaggtttacatgttcctggtgaaatggcaggacctgtcggagaaggtggtgtacc

SEQ ID NO: 30514 - RNA, 82 nt, synthetic construct
  source 1..82: mol_type = other RNA
tggggtcccccgactctggctttcccccaggtctacatgttcctggtgaaatggcaggacctgtcggagaaggtggtttacc

SEQ ID NO: 30515 - RNA, 82 nt, synthetic construct
  source 1..82: mol_type = other RNA
tggggtcccccgactctggctttcccccaggtatacatgttcctggtgaaatggcaggacctgtcggagaaggtggtatacc

SEQ ID NO: 30516 - RNA, 83 nt, synthetic construct
  source 1..83: mol_type = other RNA
atggggtcccccgactctggctttcccccaggtgtacatgttcctggtgaaatggcaggacctgtcggagaaggtggtctacc

SEQ ID NO: 30517 - RNA, 83 nt, synthetic construct
  source 1..83: mol_type = other RNA
atggggtcccccgactctggctttcccccaggtttacatgttcctggtgaaatggcaggacctgtcggagaaggtggtgtacc

SEQ ID NO: 30518 - RNA, 83 nt, synthetic construct
  source 1..83: mol_type = other RNA
atggggtcccccgactctggctttcccccaggtttacatgttcctggtgaaatggcaggacctgtcggagaaggtggtctacc

SEQ ID NO: 30519 - RNA, 83 nt, synthetic construct
  source 1..83: mol_type = other RNA
atggggtcccccgactctggctttcccccaggtctacatgttcctggtgaaatggcaggacctgtcggagaaggtggtctacc

SEQ ID NO: 30520 - RNA, 83 nt, synthetic construct
  source 1..83: mol_type = other RNA
atggggtcccccgactctggctttcccccaggtgtacatgttcctggtgaaatggcaggacctgtcggagaaggtggtttacc

SEQ ID NO: 30521 - RNA, 83 nt, synthetic construct
  source 1..83: mol_type = other RNA
atggggtcccccgactctggctttcccccaggtctacatgttcctggtgaaatggcaggacctgtcggagaaggtggtatacc

SEQ ID NO: 30522 - RNA, 83 nt, synthetic construct
  source 1..83: mol_type = other RNA
atggggtcccccgactctggctttcccccaggtctacatgttcctggtgaaatggcaggacctgtcggagaaggtggtttacc

SEQ ID NO: 30523 - RNA, 83 nt, synthetic construct
  source 1..83: mol_type = other RNA
atggggtcccccgactctggctttcccccaggtatacatgttcctggtgaaatggcaggacctgtcggagaaggtggtatacc

SEQ ID NO: 30524 - RNA, 83 nt, synthetic construct
  source 1..83: mol_type = other RNA
atggggtcccccgactctggctttcccccaggtctacatgttcctggtgaaatggcaggacctgtcggagaaggtggtgtacc

SEQ ID NO: 30525 - RNA, 83 nt, synthetic construct
  source 1..83: mol_type = other RNA
atggggtcccccgactctggctttcccccaggtttacatgttcctggtgaaatggcaggacctgtcggagaaggtggtatacc

SEQ ID NO: 30526 - RNA, 83 nt, synthetic construct
  source 1..83: mol_type = other RNA
atggggtcccccgactctggctttcccccaggtatacatgttcctggtgaaatggcaggacctgtcggagaaggtggtgtacc

SEQ ID NO: 30527 - RNA, 83 nt, synthetic construct
  source 1..83: mol_type = other RNA
atggggtcccccgactctggctttcccccaggtatacatgttcctggtgaaatggcaggacctgtcggagaaggtggtttacc

SEQ ID NO: 30528 - RNA, 83 nt, synthetic construct
  source 1..83: mol_type = other RNA
atggggtcccccgactctggctttcccccaggtgtacatgttcctggtgaaatggcaggacctgtcggagaaggtggtgtacc

SEQ ID NO: 30529 - RNA, 83 nt, synthetic construct
  source 1..83: mol_type = other RNA
atggggtcccccgactctggctttcccccaggtgtacatgttcctggtgaaatggcaggacctgtcggagaaggtggtatacc

SEQ ID NO: 30530 - RNA, 83 nt, synthetic construct
  source 1..83: mol_type = other RNA
atggggtcccccgactctggctttcccccaggtatacatgttcctggtgaaatggcaggacctgtcggagaaggtggtctacc

SEQ ID NO: 30531 - RNA, 83 nt, synthetic construct
  source 1..83: mol_type = other RNA
atggggtcccccgactctggctttcccccaggtttacatgttcctggtgaaatggcaggacctgtcggagaaggtggtttacc

SEQ ID NO: 30532 - RNA, 84 nt, synthetic construct
  source 1..84: mol_type = other RNA
aatggggtcccccgactctggctttcccccaggtgtacatgttcctggtgaaatggcaggacctgtcggagaaggtggtctacc

SEQ ID NO: 30533 - RNA, 84 nt, synthetic construct
  source 1..84: mol_type = other RNA
aatggggtcccccgactctggctttcccccaggtctacatgttcctggtgaaatggcaggacctgtcggagaaggtggtgtacc

SEQ ID NO: 30534 - RNA, 84 nt, synthetic construct
  source 1..84: mol_type = other RNA
aatggggtcccccgactctggctttcccccaggtttacatgttcctggtgaaatggcaggacctgtcggagaaggtggtttacc

SEQ ID NO: 30535 - RNA, 84 nt, synthetic construct
  source 1..84: mol_type = other RNA
aatggggtcccccgactctggctttcccccaggtttacatgttcctggtgaaatggcaggacctgtcggagaaggtggtgtacc

SEQ ID NO: 30536 - RNA, 84 nt, synthetic construct
  source 1..84: mol_type = other RNA
aatggggtcccccgactctggctttcccccaggtatacatgttcctggtgaaatggcaggacctgtcggagaaggtggtatacc

SEQ ID NO: 30537 - RNA, 84 nt, synthetic construct
  source 1..84: mol_type = other RNA
aatggggtcccccgactctggctttcccccaggtttacatgttcctggtgaaatggcaggacctgtcggagaaggtggtatacc

SEQ ID NO: 30538 - RNA, 84 nt, synthetic construct
  source 1..84: mol_type = other RNA
aatggggtcccccgactctggctttcccccaggtctacatgttcctggtgaaatggcaggacctgtcggagaaggtggtttacc

SEQ ID NO: 30539 - RNA, 84 nt, synthetic construct
  source 1..84: mol_type = other RNA
aatggggtcccccgactctggctttcccccaggtatacatgttcctggtgaaatggcaggacctgtcggagaaggtggtctacc

SEQ ID NO: 30540 - RNA, 84 nt, synthetic construct
  source 1..84: mol_type = other RNA
aatggggtcccccgactctggctttcccccaggtatacatgttcctggtgaaatggcaggacctgtcggagaaggtggtgtacc

SEQ ID NO: 30541 - RNA, 84 nt, synthetic construct
  source 1..84: mol_type = other RNA
aatggggtcccccgactctggctttcccccaggtatacatgttcctggtgaaatggcaggacctgtcggagaaggtggtttacc

SEQ ID NO: 30542 - RNA, 84 nt, synthetic construct
  source 1..84: mol_type = other RNA
aatggggtcccccgactctggctttcccccaggtctacatgttcctggtgaaatggcaggacctgtcggagaaggtggtatacc

SEQ ID NO: 30543 - RNA, 84 nt, synthetic construct
  source 1..84: mol_type = other RNA
aatggggtcccccgactctggctttcccccaggtctacatgttcctggtgaaatggcaggacctgtcggagaaggtggtctacc

SEQ ID NO: 30544 - RNA, 84 nt, synthetic construct
  source 1..84: mol_type = other RNA
aatggggtcccccgactctggctttcccccaggtgtacatgttcctggtgaaatggcaggacctgtcggagaaggtggtatacc

SEQ ID NO: 30545 - RNA, 84 nt, synthetic construct
  source 1..84: mol_type = other RNA
aatggggtcccccgactctggctttcccccaggtgtacatgttcctggtgaaatggcaggacctgtcggagaaggtggtgtacc

SEQ ID NO: 30546 - RNA, 84 nt, synthetic construct
  source 1..84: mol_type = other RNA
aatggggtcccccgactctggctttcccccaggtgtacatgttcctggtgaaatggcaggacctgtcggagaaggtggtttacc

SEQ ID NO: 30547 - RNA, 84 nt, synthetic construct
  source 1..84: mol_type = other RNA
aatggggtcccccgactctggctttcccccaggtttacatgttcctggtgaaatggcaggacctgtcggagaaggtggtctacc

SEQ ID NO: 30548 - RNA, 85 nt, synthetic construct
  source 1..85: mol_type = other RNA
gaatggggtcccccgactctggctttcccccaggtatacatgttcctggtgaaatggcaggacctgtcggagaaggtggtttacc

SEQ ID NO: 30549 - RNA, 85 nt, synthetic construct
  source 1..85: mol_type = other RNA
gaatggggtcccccgactctggctttcccccaggtctacatgttcctggtgaaatggcaggacctgtcggagaaggtggtctacc

SEQ ID NO: 30550 - RNA, 85 nt, synthetic construct
  source 1..85: mol_type = other RNA
gaatggggtcccccgactctggctttcccccaggtctacatgttcctggtgaaatggcaggacctgtcggagaaggtggtatacc

SEQ ID NO: 30551 - RNA, 85 nt, synthetic construct
  source 1..85: mol_type = other RNA
gaatggggtcccccgactctggctttcccccaggtatacatgttcctggtgaaatggcaggacctgtcggagaaggtggtctacc

SEQ ID NO: 30552 - RNA, 85 nt, synthetic construct
  source 1..85: mol_type = other RNA
gaatggggtcccccgactctggctttcccccaggtatacatgttcctggtgaaatggcaggacctgtcggagaaggtggtatacc

SEQ ID NO: 30553 - RNA, 85 nt, synthetic construct
  source 1..85: mol_type = other RNA
gaatggggtcccccgactctggctttcccccaggtttacatgttcctggtgaaatggcaggacctgtcggagaaggtggtttacc

SEQ ID NO: 30554 - RNA, 85 nt, synthetic construct
  source 1..85: mol_type = other RNA
gaatggggtcccccgactctggctttcccccaggtatacatgttcctggtgaaatggcaggacctgtcggagaaggtggtgtacc

SEQ ID NO: 30555 - RNA, 85 nt, synthetic construct
  source 1..85: mol_type = other RNA
gaatggggtcccccgactctggctttcccccaggtttacatgttcctggtgaaatggcaggacctgtcggagaaggtggtctacc

SEQ ID NO: 30556 - RNA, 85 nt, synthetic construct
  source 1..85: mol_type = other RNA
gaatggggtcccccgactctggctttcccccaggtgtacatgttcctggtgaaatggcaggacctgtcggagaaggtggtttacc

SEQ ID NO: 30557 - RNA, 85 nt, synthetic construct
  source 1..85: mol_type = other RNA
gaatggggtcccccgactctggctttcccccaggtctacatgttcctggtgaaatggcaggacctgtcggagaaggtggtgtacc

SEQ ID NO: 30558 - RNA, 85 nt, synthetic construct
  source 1..85: mol_type = other RNA
gaatggggtcccccgactctggctttcccccaggtgtacatgttcctggtgaaatggcaggacctgtcggagaaggtggtctacc

SEQ ID NO: 30559 - RNA, 85 nt, synthetic construct
  source 1..85: mol_type = other RNA
gaatggggtcccccgactctggctttcccccaggtgtacatgttcctggtgaaatggcaggacctgtcggagaaggtggtatacc

SEQ ID NO: 30560 - RNA, 85 nt, synthetic construct
  source 1..85: mol_type = other RNA
gaatggggtcccccgactctggctttcccccaggtctacatgttcctggtgaaatggcaggacctgtcggagaaggtggtttacc

SEQ ID NO: 30561 - RNA, 85 nt, synthetic construct
  source 1..85: mol_type = other RNA
gaatggggtcccccgactctggctttcccccaggtttacatgttcctggtgaaatggcaggacctgtcggagaaggtggtgtacc

SEQ ID NO: 30562 - RNA, 85 nt, synthetic construct
  source 1..85: mol_type = other RNA
gaatggggtcccccgactctggctttcccccaggtgtacatgttcctggtgaaatggcaggacctgtcggagaaggtggtgtacc

SEQ ID NO: 30563 - RNA, 85 nt, synthetic construct
  source 1..85: mol_type = other RNA
gaatggggtcccccgactctggctttcccccaggtttacatgttcctggtgaaatggcaggacctgtcggagaaggtggtatacc

SEQ ID NO: 30564 - RNA, 86 nt, synthetic construct
  source 1..86: mol_type = other RNA
tgaatggggtcccccgactctggctttcccccaggtctacatgttcctggtgaaatggcaggacctgtcggagaaggtggtttacc

SEQ ID NO: 30565 - RNA, 86 nt, synthetic construct
  source 1..86: mol_type = other RNA
tgaatggggtcccccgactctggctttcccccaggtatacatgttcctggtgaaatggcaggacctgtcggagaaggtggtatacc

SEQ ID NO: 30566 - RNA, 86 nt, synthetic construct
  source 1..86: mol_type = other RNA
tgaatggggtcccccgactctggctttcccccaggtatacatgttcctggtgaaatggcaggacctgtcggagaaggtggtctacc

SEQ ID NO: 30567 - RNA, 86 nt, synthetic construct
  source 1..86: mol_type = other RNA
tgaatggggtcccccgactctggctttcccccaggtatacatgttcctggtgaaatggcaggacctgtcggagaaggtggtgtacc

SEQ ID NO: 30568 - RNA, 86 nt, synthetic construct
  source 1..86: mol_type = other RNA
tgaatggggtcccccgactctggctttcccccaggtatacatgttcctggtgaaatggcaggacctgtcggagaaggtggtttacc

SEQ ID NO: 30569 - RNA, 86 nt, synthetic construct
  source 1..86: mol_type = other RNA
tgaatggggtcccccgactctggctttcccccaggtgtacatgttcctggtgaaatggcaggacctgtcggagaaggtggtgtacc

SEQ ID NO: 30570 - RNA, 86 nt, synthetic construct
  source 1..86: mol_type = other RNA
tgaatggggtcccccgactctggctttcccccaggtctacatgttcctggtgaaatggcaggacctgtcggagaaggtggtgtacc

SEQ ID NO: 30571 - RNA, 86 nt, synthetic construct
  source 1..86: mol_type = other RNA
tgaatggggtcccccgactctggctttcccccaggtctacatgttcctggtgaaatggcaggacctgtcggagaaggtggtatacc

SEQ ID NO: 30572 - RNA, 86 nt, synthetic construct
  source 1..86: mol_type = other RNA
tgaatggggtcccccgactctggctttcccccaggtgtacatgttcctggtgaaatggcaggacctgtcggagaaggtggtatacc

SEQ ID NO: 30573 - RNA, 86 nt, synthetic construct
  source 1..86: mol_type = other RNA
tgaatggggtcccccgactctggctttcccccaggtttacatgttcctggtgaaatggcaggacctgtcggagaaggtggtgtacc

SEQ ID NO: 30574 - RNA, 86 nt, synthetic construct
  source 1..86: mol_type = other RNA
tgaatggggtcccccgactctggctttcccccaggtgtacatgttcctggtgaaatggcaggacctgtcggagaaggtggtctacc

SEQ ID NO: 30575 - RNA, 86 nt, synthetic construct
  source 1..86: mol_type = other RNA
tgaatggggtcccccgactctggctttcccccaggtttacatgttcctggtgaaatggcaggacctgtcggagaaggtggtttacc

SEQ ID NO: 30576 - RNA, 86 nt, synthetic construct
  source 1..86: mol_type = other RNA
tgaatggggtcccccgactctggctttcccccaggtttacatgttcctggtgaaatggcaggacctgtcggagaaggtggtctacc

SEQ ID NO: 30577 - RNA, 86 nt, synthetic construct
  source 1..86: mol_type = other RNA
tgaatggggtcccccgactctggctttcccccaggtttacatgttcctggtgaaatggcaggacctgtcggagaaggtggtatacc

SEQ ID NO: 30578 - RNA, 86 nt, synthetic construct
  source 1..86: mol_type = other RNA
tgaatggggtcccccgactctggctttcccccaggtgtacatgttcctggtgaaatggcaggacctgtcggagaaggtggtttacc

SEQ ID NO: 30579 - RNA, 86 nt, synthetic construct
  source 1..86: mol_type = other RNA
tgaatggggtcccccgactctggctttcccccaggtctacatgttcctggtgaaatggcaggacctgtcggagaaggtggtctacc

SEQ ID NO: 30580 - RNA, 87 nt, synthetic construct
  source 1..87: mol_type = other RNA
ctgaatggggtcccccgactctggctttcccccaggtctacatgttcctggtgaaatggcaggacctgtcggagaaggtggtttacc

SEQ ID NO: 30581 - RNA, 87 nt, synthetic construct
  source 1..87: mol_type = other RNA
ctgaatggggtcccccgactctggctttcccccaggtgtacatgttcctggtgaaatggcaggacctgtcggagaaggtggtctacc

SEQ ID NO: 30582 - RNA, 87 nt, synthetic construct
  source 1..87: mol_type = other RNA
ctgaatggggtcccccgactctggctttcccccaggtgtacatgttcctggtgaaatggcaggacctgtcggagaaggtggtatacc

SEQ ID NO: 30583 - RNA, 87 nt, synthetic construct
  source 1..87: mol_type = other RNA
ctgaatggggtcccccgactctggctttcccccaggtttacatgttcctggtgaaatggcaggacctgtcggagaaggtggtctacc

SEQ ID NO: 30584 - RNA, 87 nt, synthetic construct
  source 1..87: mol_type = other RNA
ctgaatggggtcccccgactctggctttcccccaggtgtacatgttcctggtgaaatggcaggacctgtcggagaaggtggtgtacc

SEQ ID NO: 30585 - RNA, 87 nt, synthetic construct
  source 1..87: mol_type = other RNA
ctgaatggggtcccccgactctggctttcccccaggtttacatgttcctggtgaaatggcaggacctgtcggagaaggtggtatacc

SEQ ID NO: 30586 - RNA, 87 nt, synthetic construct
  source 1..87: mol_type = other RNA
ctgaatggggtcccccgactctggctttcccccaggtgtacatgttcctggtgaaatggcaggacctgtcggagaaggtggtttacc

SEQ ID NO: 30587 - RNA, 87 nt, synthetic construct
  source 1..87: mol_type = other RNA
ctgaatggggtcccccgactctggctttcccccaggtctacatgttcctggtgaaatggcaggacctgtcggagaaggtggtgtacc

SEQ ID NO: 30588 - RNA, 87 nt, synthetic construct
  source 1..87: mol_type = other RNA
ctgaatggggtcccccgactctggctttcccccaggtttacatgttcctggtgaaatggcaggacctgtcggagaaggtggtgtacc

SEQ ID NO: 30589 - RNA, 87 nt, synthetic construct
  source 1..87: mol_type = other RNA
ctgaatggggtcccccgactctggctttcccccaggtctacatgttcctggtgaaatggcaggacctgtcggagaaggtggtctacc

SEQ ID NO: 30590 - RNA, 87 nt, synthetic construct
  source 1..87: mol_type = other RNA
ctgaatggggtcccccgactctggctttcccccaggtctacatgttcctggtgaaatggcaggacctgtcggagaaggtggtatacc

SEQ ID NO: 30591 - RNA, 87 nt, synthetic construct
  source 1..87: mol_type = other RNA
ctgaatggggtcccccgactctggctttcccccaggtatacatgttcctggtgaaatggcaggacctgtcggagaaggtggtttacc

SEQ ID NO: 30592 - RNA, 87 nt, synthetic construct
  source 1..87: mol_type = other RNA
ctgaatggggtcccccgactctggctttcccccaggtatacatgttcctggtgaaatggcaggacctgtcggagaaggtggtgtacc

SEQ ID NO: 30593 - RNA, 87 nt, synthetic construct
  source 1..87: mol_type = other RNA
ctgaatggggtcccccgactctggctttcccccaggtatacatgttcctggtgaaatggcaggacctgtcggagaaggtggtctacc

SEQ ID NO: 30594 - RNA, 87 nt, synthetic construct
  source 1..87: mol_type = other RNA
ctgaatggggtcccccgactctggctttcccccaggtatacatgttcctggtgaaatggcaggacctgtcggagaaggtggtatacc

SEQ ID NO: 30595 - RNA, 87 nt, synthetic construct
  source 1..87: mol_type = other RNA
ctgaatggggtcccccgactctggctttcccccaggtttacatgttcctggtgaaatggcaggacctgtcggagaaggtggtttacc

SEQ ID NO: 30596 - RNA, 88 nt, synthetic construct
  source 1..88: mol_type = other RNA
gctgaatggggtcccccgactctggctttcccccaggtatacatgttcctggtgaaatggcaggacctgtcggagaaggtggtgtacc

SEQ ID NO: 30597 - RNA, 88 nt, synthetic construct
  source 1..88: mol_type = other RNA
gctgaatggggtcccccgactctggctttcccccaggtctacatgttcctggtgaaatggcaggacctgtcggagaaggtggtttacc

SEQ ID NO: 30598 - RNA, 88 nt, synthetic construct
  source 1..88: mol_type = other RNA
gctgaatggggtcccccgactctggctttcccccaggtgtacatgttcctggtgaaatggcaggacctgtcggagaaggtggtgtacc

SEQ ID NO: 30599 - RNA, 88 nt, synthetic construct
  source 1..88: mol_type = other RNA
gctgaatggggtcccccgactctggctttcccccaggtatacatgttcctggtgaaatggcaggacctgtcggagaaggtggtttacc

SEQ ID NO: 30600 - RNA, 88 nt, synthetic construct
  source 1..88: mol_type = other RNA
gctgaatggggtcccccgactctggctttcccccaggtgtacatgttcctggtgaaatggcaggacctgtcggagaaggtggtatacc

SEQ ID NO: 30601 - RNA, 88 nt, synthetic construct
  source 1..88: mol_type = other RNA
gctgaatggggtcccccgactctggctttcccccaggtatacatgttcctggtgaaatggcaggacctgtcggagaaggtggtatacc

SEQ ID NO: 30602 - RNA, 88 nt, synthetic construct
  source 1..88: mol_type = other RNA
gctgaatggggtcccccgactctggctttcccccaggtttacatgttcctggtgaaatggcaggacctgtcggagaaggtggtgtacc

SEQ ID NO: 30603 - RNA, 88 nt, synthetic construct
  source 1..88: mol_type = other RNA
gctgaatggggtcccccgactctggctttcccccaggtttacatgttcctggtgaaatggcaggacctgtcggagaaggtggtttacc

SEQ ID NO: 30604 - RNA, 88 nt, synthetic construct
  source 1..88: mol_type = other RNA
gctgaatggggtcccccgactctggctttcccccaggtatacatgttcctggtgaaatggcaggacctgtcggagaaggtggtctacc

SEQ ID NO: 30605 - RNA, 88 nt, synthetic construct
  source 1..88: mol_type = other RNA
gctgaatggggtcccccgactctggctttcccccaggtttacatgttcctggtgaaatggcaggacctgtcggagaaggtggtatacc

SEQ ID NO: 30606 - RNA, 88 nt, synthetic construct
  source 1..88: mol_type = other RNA
gctgaatggggtcccccgactctggctttcccccaggtgtacatgttcctggtgaaatggcaggacctgtcggagaaggtggtttacc

SEQ ID NO: 30607 - RNA, 88 nt, synthetic construct
  source 1..88: mol_type = other RNA
gctgaatggggtcccccgactctggctttcccccaggtgtacatgttcctggtgaaatggcaggacctgtcggagaaggtggtctacc

SEQ ID NO: 30608 - RNA, 88 nt, synthetic construct
  source 1..88: mol_type = other RNA
gctgaatggggtcccccgactctggctttcccccaggtttacatgttcctggtgaaatggcaggacctgtcggagaaggtggtctacc

SEQ ID NO: 30609 - RNA, 88 nt, synthetic construct
  source 1..88: mol_type = other RNA
gctgaatggggtcccccgactctggctttcccccaggtctacatgttcctggtgaaatggcaggacctgtcggagaaggtggtatacc

SEQ ID NO: 30610 - RNA, 88 nt, synthetic construct
  source 1..88: mol_type = other RNA
gctgaatggggtcccccgactctggctttcccccaggtctacatgttcctggtgaaatggcaggacctgtcggagaaggtggtgtacc

SEQ ID NO: 30611 - RNA, 88 nt, synthetic construct
  source 1..88: mol_type = other RNA
gctgaatggggtcccccgactctggctttcccccaggtctacatgttcctggtgaaatggcaggacctgtcggagaaggtggtctacc

SEQ ID NO: 30612 - RNA, 89 nt, synthetic construct
  source 1..89: mol_type = other RNA
ggctgaatggggtcccccgactctggctttcccccaggtatacatgttcctggtgaaatggcaggacctgtcggagaaggtggtatacc

SEQ ID NO: 30613 - RNA, 89 nt, synthetic construct
  source 1..89: mol_type = other RNA
ggctgaatggggtcccccgactctggctttcccccaggtgtacatgttcctggtgaaatggcaggacctgtcggagaaggtggtttacc

SEQ ID NO: 30614 - RNA, 89 nt, synthetic construct
  source 1..89: mol_type = other RNA
ggctgaatggggtcccccgactctggctttcccccaggtttacatgttcctggtgaaatggcaggacctgtcggagaaggtggtctacc

SEQ ID NO: 30615 - RNA, 89 nt, synthetic construct
  source 1..89: mol_type = other RNA
ggctgaatggggtcccccgactctggctttcccccaggtctacatgttcctggtgaaatggcaggacctgtcggagaaggtggtgtacc

SEQ ID NO: 30616 - RNA, 89 nt, synthetic construct
  source 1..89: mol_type = other RNA
ggctgaatggggtcccccgactctggctttcccccaggtttacatgttcctggtgaaatggcaggacctgtcggagaaggtggtttacc

SEQ ID NO: 30617 - RNA, 89 nt, synthetic construct
  source 1..89: mol_type = other RNA
ggctgaatggggtcccccgactctggctttcccccaggtttacatgttcctggtgaaatggcaggacctgtcggagaaggtggtatacc

SEQ ID NO: 30618 - RNA, 89 nt, synthetic construct
  source 1..89: mol_type = other RNA
ggctgaatggggtcccccgactctggctttcccccaggtctacatgttcctggtgaaatggcaggacctgtcggagaaggtggtctacc

SEQ ID NO: 30619 - RNA, 89 nt, synthetic construct
  source 1..89: mol_type = other RNA
ggctgaatggggtcccccgactctggctttcccccaggtttacatgttcctggtgaaatggcaggacctgtcggagaaggtggtgtacc

SEQ ID NO: 30620 - RNA, 89 nt, synthetic construct
  source 1..89: mol_type = other RNA
ggctgaatggggtcccccgactctggctttcccccaggtgtacatgttcctggtgaaatggcaggacctgtcggagaaggtggtgtacc

SEQ ID NO: 30621 - RNA, 89 nt, synthetic construct
  source 1..89: mol_type = other RNA
ggctgaatggggtcccccgactctggctttcccccaggtctacatgttcctggtgaaatggcaggacctgtcggagaaggtggtttacc

SEQ ID NO: 30622 - RNA, 89 nt, synthetic construct
  source 1..89: mol_type = other RNA
ggctgaatggggtcccccgactctggctttcccccaggtatacatgttcctggtgaaatggcaggacctgtcggagaaggtggtgtacc

SEQ ID NO: 30623 - RNA, 89 nt, synthetic construct
  source 1..89: mol_type = other RNA
ggctgaatggggtcccccgactctggctttcccccaggtatacatgttcctggtgaaatggcaggacctgtcggagaaggtggtttacc

SEQ ID NO: 30624 - RNA, 89 nt, synthetic construct
  source 1..89: mol_type = other RNA
ggctgaatggggtcccccgactctggctttcccccaggtctacatgttcctggtgaaatggcaggacctgtcggagaaggtggtatacc

SEQ ID NO: 30625 - RNA, 89 nt, synthetic construct
  source 1..89: mol_type = other RNA
ggctgaatggggtcccccgactctggctttcccccaggtgtacatgttcctggtgaaatggcaggacctgtcggagaaggtggtatacc

SEQ ID NO: 30626 - RNA, 89 nt, synthetic construct
  source 1..89: mol_type = other RNA
ggctgaatggggtcccccgactctggctttcccccaggtgtacatgttcctggtgaaatggcaggacctgtcggagaaggtggtctacc

SEQ ID NO: 30627 - RNA, 89 nt, synthetic construct
  source 1..89: mol_type = other RNA
ggctgaatggggtcccccgactctggctttcccccaggtatacatgttcctggtgaaatggcaggacctgtcggagaaggtggtctacc

SEQ ID NO: 30628 - RNA, 90 nt, synthetic construct
  source 1..90: mol_type = other RNA
aggctgaatggggtcccccgactctggctttcccccaggtgtacatgttcctggtgaaatggcaggacctgtcggagaaggtggtttacc

SEQ ID NO: 30629 - RNA, 90 nt, synthetic construct
  source 1..90: mol_type = other RNA
aggctgaatggggtcccccgactctggctttcccccaggtttacatgttcctggtgaaatggcaggacctgtcggagaaggtggtatacc

SEQ ID NO: 30630 - RNA, 90 nt, synthetic construct
  source 1..90: mol_type = other RNA
aggctgaatggggtcccccgactctggctttcccccaggtatacatgttcctggtgaaatggcaggacctgtcggagaaggtggtatacc

SEQ ID NO: 30631 - RNA, 90 nt, synthetic construct
  source 1..90: mol_type = other RNA
aggctgaatggggtcccccgactctggctttcccccaggtgtacatgttcctggtgaaatggcaggacctgtcggagaaggtggtgtacc

SEQ ID NO: 30632 - RNA, 90 nt, synthetic construct
  source 1..90: mol_type = other RNA
aggctgaatggggtcccccgactctggctttcccccaggtgtacatgttcctggtgaaatggcaggacctgtcggagaaggtggtctacc

SEQ ID NO: 30633 - RNA, 90 nt, synthetic construct
  source 1..90: mol_type = other RNA
aggctgaatggggtcccccgactctggctttcccccaggtgtacatgttcctggtgaaatggcaggacctgtcggagaaggtggtatacc

SEQ ID NO: 30634 - RNA, 90 nt, synthetic construct
  source 1..90: mol_type = other RNA
aggctgaatggggtcccccgactctggctttcccccaggtctacatgttcctggtgaaatggcaggacctgtcggagaaggtggtttacc

SEQ ID NO: 30635 - RNA, 90 nt, synthetic construct
  source 1..90: mol_type = other RNA
aggctgaatggggtcccccgactctggctttcccccaggtctacatgttcctggtgaaatggcaggacctgtcggagaaggtggtgtacc

SEQ ID NO: 30636 - RNA, 90 nt, synthetic construct
  source 1..90: mol_type = other RNA
aggctgaatggggtcccccgactctggctttcccccaggtatacatgttcctggtgaaatggcaggacctgtcggagaaggtggtttacc

SEQ ID NO: 30637 - RNA, 90 nt, synthetic construct
  source 1..90: mol_type = other RNA
aggctgaatggggtcccccgactctggctttcccccaggtctacatgttcctggtgaaatggcaggacctgtcggagaaggtggtatacc

SEQ ID NO: 30638 - RNA, 90 nt, synthetic construct
  source 1..90: mol_type = other RNA
aggctgaatggggtcccccgactctggctttcccccaggtatacatgttcctggtgaaatggcaggacctgtcggagaaggtggtgtacc

SEQ ID NO: 30639 - RNA, 90 nt, synthetic construct
  source 1..90: mol_type = other RNA
aggctgaatggggtcccccgactctggctttcccccaggtatacatgttcctggtgaaatggcaggacctgtcggagaaggtggtctacc

SEQ ID NO: 30640 - RNA, 90 nt, synthetic construct
  source 1..90: mol_type = other RNA
aggctgaatggggtcccccgactctggctttcccccaggtttacatgttcctggtgaaatggcaggacctgtcggagaaggtggtctacc

SEQ ID NO: 30641 - RNA, 90 nt, synthetic construct
  source 1..90: mol_type = other RNA
aggctgaatggggtcccccgactctggctttcccccaggtctacatgttcctggtgaaatggcaggacctgtcggagaaggtggtctacc

SEQ ID NO: 30642 - RNA, 90 nt, synthetic construct
  source 1..90: mol_type = other RNA
aggctgaatggggtcccccgactctggctttcccccaggtttacatgttcctggtgaaatggcaggacctgtcggagaaggtggtgtacc

SEQ ID NO: 30643 - RNA, 90 nt, synthetic construct
  source 1..90: mol_type = other RNA
aggctgaatggggtcccccgactctggctttcccccaggtttacatgttcctggtgaaatggcaggacctgtcggagaaggtggtttacc

SEQ ID NO: 30644 - RNA, 91 nt, synthetic construct
  source 1..91: mol_type = other RNA
gaggctgaatggggtcccccgactctggctttcccccaggtgtacatgttcctggtgaaatggcaggacctgtcggagaaggtggtgtacc

SEQ ID NO: 30645 - RNA, 91 nt, synthetic construct
  source 1..91: mol_type = other RNA
gaggctgaatggggtcccccgactctggctttcccccaggtgtacatgttcctggtgaaatggcaggacctgtcggagaaggtggtttacc

SEQ ID NO: 30646 - RNA, 91 nt, synthetic construct
  source 1..91: mol_type = other RNA
gaggctgaatggggtcccccgactctggctttcccccaggtctacatgttcctggtgaaatggcaggacctgtcggagaaggtggtatacc

SEQ ID NO: 30647 - RNA, 91 nt, synthetic construct
  source 1..91: mol_type = other RNA
gaggctgaatggggtcccccgactctggctttcccccaggtgtacatgttcctggtgaaatggcaggacctgtcggagaaggtggtctacc

SEQ ID NO: 30648 - RNA, 91 nt, synthetic construct
  source 1..91: mol_type = other RNA
gaggctgaatggggtcccccgactctggctttcccccaggtctacatgttcctggtgaaatggcaggacctgtcggagaaggtggtctacc

SEQ ID NO: 30649 - RNA, 91 nt, synthetic construct
  source 1..91: mol_type = other RNA
gaggctgaatggggtcccccgactctggctttcccccaggtatacatgttcctggtgaaatggcaggacctgtcggagaaggtggtttacc

SEQ ID NO: 30650 - RNA, 91 nt, synthetic construct
  source 1..91: mol_type = other RNA
gaggctgaatggggtcccccgactctggctttcccccaggtctacatgttcctggtgaaatggcaggacctgtcggagaaggtggtttacc

SEQ ID NO: 30651 - RNA, 91 nt, synthetic construct
  source 1..91: mol_type = other RNA
gaggctgaatggggtcccccgactctggctttcccccaggtttacatgttcctggtgaaatggcaggacctgtcggagaaggtggtttacc

SEQ ID NO: 30652 - RNA, 91 nt, synthetic construct
  source 1..91: mol_type = other RNA
gaggctgaatggggtcccccgactctggctttcccccaggtgtacatgttcctggtgaaatggcaggacctgtcggagaaggtggtatacc

SEQ ID NO: 30653 - RNA, 91 nt, synthetic construct
  source 1..91: mol_type = other RNA
gaggctgaatggggtcccccgactctggctttcccccaggtctacatgttcctggtgaaatggcaggacctgtcggagaaggtggtgtacc

SEQ ID NO: 30654 - RNA, 91 nt, synthetic construct
  source 1..91: mol_type = other RNA
gaggctgaatggggtcccccgactctggctttcccccaggtttacatgttcctggtgaaatggcaggacctgtcggagaaggtggtgtacc

SEQ ID NO: 30655 - RNA, 91 nt, synthetic construct
  source 1..91: mol_type = other RNA
gaggctgaatggggtcccccgactctggctttcccccaggtttacatgttcctggtgaaatggcaggacctgtcggagaaggtggtatacc

SEQ ID NO: 30656 - RNA, 91 nt, synthetic construct
  source 1..91: mol_type = other RNA
gaggctgaatggggtcccccgactctggctttcccccaggtttacatgttcctggtgaaatggcaggacctgtcggagaaggtggtctacc

SEQ ID NO: 30657 - RNA, 91 nt, synthetic construct
  source 1..91: mol_type = other RNA
gaggctgaatggggtcccccgactctggctttcccccaggtatacatgttcctggtgaaatggcaggacctgtcggagaaggtggtatacc

SEQ ID NO: 30658 - RNA, 91 nt, synthetic construct
  source 1..91: mol_type = other RNA
gaggctgaatggggtcccccgactctggctttcccccaggtatacatgttcctggtgaaatggcaggacctgtcggagaaggtggtctacc

SEQ ID NO: 30659 - RNA, 91 nt, synthetic construct
  source 1..91: mol_type = other RNA
gaggctgaatggggtcccccgactctggctttcccccaggtatacatgttcctggtgaaatggcaggacctgtcggagaaggtggtgtacc

SEQ ID NO: 30660 - RNA, 92 nt, synthetic construct
  source 1..92: mol_type = other RNA
ggaggctgaatggggtcccccgactctggctttcccccaggtctacatgttcctggtgaaatggcaggacctgtcggagaaggtggtgtacc

SEQ ID NO: 30661 - RNA, 92 nt, synthetic construct
  source 1..92: mol_type = other RNA
ggaggctgaatggggtcccccgactctggctttcccccaggtatacatgttcctggtgaaatggcaggacctgtcggagaaggtggtctacc

SEQ ID NO: 30662 - RNA, 92 nt, synthetic construct
  source 1..92: mol_type = other RNA
ggaggctgaatggggtcccccgactctggctttcccccaggtatacatgttcctggtgaaatggcaggacctgtcggagaaggtggtgtacc

SEQ ID NO: 30663 - RNA, 92 nt, synthetic construct
  source 1..92: mol_type = other RNA
ggaggctgaatggggtcccccgactctggctttcccccaggtatacatgttcctggtgaaatggcaggacctgtcggagaaggtggtttacc

SEQ ID NO: 30664 - RNA, 92 nt, synthetic construct
  source 1..92: mol_type = other RNA
ggaggctgaatggggtcccccgactctggctttcccccaggtctacatgttcctggtgaaatggcaggacctgtcggagaaggtggtatacc

SEQ ID NO: 30665 - RNA, 92 nt, synthetic construct
  source 1..92: mol_type = other RNA
ggaggctgaatggggtcccccgactctggctttcccccaggtctacatgttcctggtgaaatggcaggacctgtcggagaaggtggtctacc

SEQ ID NO: 30666 - RNA, 92 nt, synthetic construct
  source 1..92: mol_type = other RNA
ggaggctgaatggggtcccccgactctggctttcccccaggtatacatgttcctggtgaaatggcaggacctgtcggagaaggtggtatacc

SEQ ID NO: 30667 - RNA, 92 nt, synthetic construct
  source 1..92: mol_type = other RNA
ggaggctgaatggggtcccccgactctggctttcccccaggtctacatgttcctggtgaaatggcaggacctgtcggagaaggtggtttacc

SEQ ID NO: 30668 - RNA, 92 nt, synthetic construct
  source 1..92: mol_type = other RNA
ggaggctgaatggggtcccccgactctggctttcccccaggtttacatgttcctggtgaaatggcaggacctgtcggagaaggtggtgtacc

SEQ ID NO: 30669 - RNA, 92 nt, synthetic construct
  source 1..92: mol_type = other RNA
ggaggctgaatggggtcccccgactctggctttcccccaggtttacatgttcctggtgaaatggcaggacctgtcggagaaggtggtttacc

SEQ ID NO: 30670 - RNA, 92 nt, synthetic construct
  source 1..92: mol_type = other RNA
ggaggctgaatggggtcccccgactctggctttcccccaggtgtacatgttcctggtgaaatggcaggacctgtcggagaaggtggtttacc

SEQ ID NO: 30671 - RNA, 92 nt, synthetic construct
  source 1..92: mol_type = other RNA
ggaggctgaatggggtcccccgactctggctttcccccaggtgtacatgttcctggtgaaatggcaggacctgtcggagaaggtggtctacc

SEQ ID NO: 30672 - RNA, 92 nt, synthetic construct
  source 1..92: mol_type = other RNA
ggaggctgaatggggtcccccgactctggctttcccccaggtgtacatgttcctggtgaaatggcaggacctgtcggagaaggtggtgtacc

SEQ ID NO: 30673 - RNA, 92 nt, synthetic construct
  source 1..92: mol_type = other RNA
ggaggctgaatggggtcccccgactctggctttcccccaggtttacatgttcctggtgaaatggcaggacctgtcggagaaggtggtatacc

SEQ ID NO: 30674 - RNA, 92 nt, synthetic construct
  source 1..92: mol_type = other RNA
ggaggctgaatggggtcccccgactctggctttcccccaggtgtacatgttcctggtgaaatggcaggacctgtcggagaaggtggtatacc

SEQ ID NO: 30675 - RNA, 92 nt, synthetic construct
  source 1..92: mol_type = other RNA
ggaggctgaatggggtcccccgactctggctttcccccaggtttacatgttcctggtgaaatggcaggacctgtcggagaaggtggtctacc

SEQ ID NO: 30676 - RNA, 93 nt, synthetic construct
  source 1..93: mol_type = other RNA
tggaggctgaatggggtcccccgactctggctttcccccaggtgtacatgttcctggtgaaatggcaggacctgtcggagaaggtggtatacc

SEQ ID NO: 30677 - RNA, 93 nt, synthetic construct
  source 1..93: mol_type = other RNA
tggaggctgaatggggtcccccgactctggctttcccccaggtttacatgttcctggtgaaatggcaggacctgtcggagaaggtggtttacc

SEQ ID NO: 30678 - RNA, 93 nt, synthetic construct
  source 1..93: mol_type = other RNA
tggaggctgaatggggtcccccgactctggctttcccccaggtttacatgttcctggtgaaatggcaggacctgtcggagaaggtggtgtacc

SEQ ID NO: 30679 - RNA, 93 nt, synthetic construct
  source 1..93: mol_type = other RNA
tggaggctgaatggggtcccccgactctggctttcccccaggtgtacatgttcctggtgaaatggcaggacctgtcggagaaggtggtgtacc

SEQ ID NO: 30680 - RNA, 93 nt, synthetic construct
  source 1..93: mol_type = other RNA
tggaggctgaatggggtcccccgactctggctttcccccaggtgtacatgttcctggtgaaatggcaggacctgtcggagaaggtggtttacc

SEQ ID NO: 30681 - RNA, 93 nt, synthetic construct
  source 1..93: mol_type = other RNA
tggaggctgaatggggtcccccgactctggctttcccccaggtttacatgttcctggtgaaatggcaggacctgtcggagaaggtggtatacc

SEQ ID NO: 30682 - RNA, 93 nt, synthetic construct
  source 1..93: mol_type = other RNA
tggaggctgaatggggtcccccgactctggctttcccccaggtctacatgttcctggtgaaatggcaggacctgtcggagaaggtggtgtacc

SEQ ID NO: 30683 - RNA, 93 nt, synthetic construct
  source 1..93: mol_type = other RNA
tggaggctgaatggggtcccccgactctggctttcccccaggtatacatgttcctggtgaaatggcaggacctgtcggagaaggtggtatacc

SEQ ID NO: 30684 - RNA, 93 nt, synthetic construct
  source 1..93: mol_type = other RNA
tggaggctgaatggggtcccccgactctggctttcccccaggtatacatgttcctggtgaaatggcaggacctgtcggagaaggtggtctacc

SEQ ID NO: 30685 - RNA, 93 nt, synthetic construct
  source 1..93: mol_type = other RNA
tggaggctgaatggggtcccccgactctggctttcccccaggtatacatgttcctggtgaaatggcaggacctgtcggagaaggtggtgtacc

SEQ ID NO: 30686 - RNA, 93 nt, synthetic construct
  source 1..93: mol_type = other RNA
tggaggctgaatggggtcccccgactctggctttcccccaggtttacatgttcctggtgaaatggcaggacctgtcggagaaggtggtctacc

SEQ ID NO: 30687 - RNA, 93 nt, synthetic construct
  source 1..93: mol_type = other RNA
tggaggctgaatggggtcccccgactctggctttcccccaggtctacatgttcctggtgaaatggcaggacctgtcggagaaggtggtctacc

SEQ ID NO: 30688 - RNA, 93 nt, synthetic construct
  source 1..93: mol_type = other RNA
tggaggctgaatggggtcccccgactctggctttcccccaggtctacatgttcctggtgaaatggcaggacctgtcggagaaggtggtatacc

SEQ ID NO: 30689 - RNA, 93 nt, synthetic construct
  source 1..93: mol_type = other RNA
tggaggctgaatggggtcccccgactctggctttcccccaggtctacatgttcctggtgaaatggcaggacctgtcggagaaggtggtttacc

SEQ ID NO: 30690 - RNA, 93 nt, synthetic construct
  source 1..93: mol_type = other RNA
tggaggctgaatggggtcccccgactctggctttcccccaggtgtacatgttcctggtgaaatggcaggacctgtcggagaaggtggtctacc

SEQ ID NO: 30691 - RNA, 93 nt, synthetic construct
  source 1..93: mol_type = other RNA
tggaggctgaatggggtcccccgactctggctttcccccaggtatacatgttcctggtgaaatggcaggacctgtcggagaaggtggtttacc

SEQ ID NO: 30692 - RNA, 94 nt, synthetic construct
  source 1..94: mol_type = other RNA
ttggaggctgaatggggtcccccgactctggctttcccccaggtctacatgttcctggtgaaatggcaggacctgtcggagaaggtggtctacc

SEQ ID NO: 30693 - RNA, 94 nt, synthetic construct
  source 1..94: mol_type = other RNA
ttggaggctgaatggggtcccccgactctggctttcccccaggtatacatgttcctggtgaaatggcaggacctgtcggagaaggtggtatacc

SEQ ID NO: 30694 - RNA, 94 nt, synthetic construct
  source 1..94: mol_type = other RNA
ttggaggctgaatggggtcccccgactctggctttcccccaggtatacatgttcctggtgaaatggcaggacctgtcggagaaggtggtctacc

SEQ ID NO: 30695 - RNA, 94 nt, synthetic construct
  source 1..94: mol_type = other RNA
ttggaggctgaatggggtcccccgactctggctttcccccaggtatacatgttcctggtgaaatggcaggacctgtcggagaaggtggtgtacc

SEQ ID NO: 30696 - RNA, 94 nt, synthetic construct
  source 1..94: mol_type = other RNA
ttggaggctgaatggggtcccccgactctggctttcccccaggtatacatgttcctggtgaaatggcaggacctgtcggagaaggtggtttacc

SEQ ID NO: 30697 - RNA, 94 nt, synthetic construct
  source 1..94: mol_type = other RNA
ttggaggctgaatggggtcccccgactctggctttcccccaggtctacatgttcctggtgaaatggcaggacctgtcggagaaggtggtatacc

SEQ ID NO: 30698 - RNA, 94 nt, synthetic construct
  source 1..94: mol_type = other RNA
ttggaggctgaatggggtcccccgactctggctttcccccaggtctacatgttcctggtgaaatggcaggacctgtcggagaaggtggtgtacc

SEQ ID NO: 30699 - RNA, 94 nt, synthetic construct
  source 1..94: mol_type = other RNA
ttggaggctgaatggggtcccccgactctggctttcccccaggtgtacatgttcctggtgaaatggcaggacctgtcggagaaggtggtatacc

SEQ ID NO: 30700 - RNA, 94 nt, synthetic construct
  source 1..94: mol_type = other RNA
ttggaggctgaatggggtcccccgactctggctttcccccaggtgtacatgttcctggtgaaatggcaggacctgtcggagaaggtggtctacc

SEQ ID NO: 30701 - RNA, 94 nt, synthetic construct
  source 1..94: mol_type = other RNA
ttggaggctgaatggggtcccccgactctggctttcccccaggtgtacatgttcctggtgaaatggcaggacctgtcggagaaggtggtgtacc

SEQ ID NO: 30702 - RNA, 94 nt, synthetic construct
  source 1..94: mol_type = other RNA
ttggaggctgaatggggtcccccgactctggctttcccccaggtgtacatgttcctggtgaaatggcaggacctgtcggagaaggtggtttacc

SEQ ID NO: 30703 - RNA, 94 nt, synthetic construct
  source 1..94: mol_type = other RNA
ttggaggctgaatggggtcccccgactctggctttcccccaggtttacatgttcctggtgaaatggcaggacctgtcggagaaggtggtctacc

SEQ ID NO: 30704 - RNA, 94 nt, synthetic construct
  source 1..94: mol_type = other RNA
ttggaggctgaatggggtcccccgactctggctttcccccaggtttacatgttcctggtgaaatggcaggacctgtcggagaaggtggtgtacc

SEQ ID NO: 30705 - RNA, 94 nt, synthetic construct
  source 1..94: mol_type = other RNA
ttggaggctgaatggggtcccccgactctggctttcccccaggtttacatgttcctggtgaaatggcaggacctgtcggagaaggtggtttacc

SEQ ID NO: 30706 - RNA, 94 nt, synthetic construct
  source 1..94: mol_type = other RNA
ttggaggctgaatggggtcccccgactctggctttcccccaggtctacatgttcctggtgaaatggcaggacctgtcggagaaggtggtttacc

SEQ ID NO: 30707 - RNA, 94 nt, synthetic construct
  source 1..94: mol_type = other RNA
ttggaggctgaatggggtcccccgactctggctttcccccaggtttacatgttcctggtgaaatggcaggacctgtcggagaaggtggtatacc

SEQ ID NO: 30708 - RNA, 95 nt, synthetic construct
  source 1..95: mol_type = other RNA
tttggaggctgaatggggtcccccgactctggctttcccccaggtatacatgttcctggtgaaatggcaggacctgtcggagaaggtggtttacc

SEQ ID NO: 30709 - RNA, 95 nt, synthetic construct
  source 1..95: mol_type = other RNA
tttggaggctgaatggggtcccccgactctggctttcccccaggtttacatgttcctggtgaaatggcaggacctgtcggagaaggtggtttacc

SEQ ID NO: 30710 - RNA, 95 nt, synthetic construct
  source 1..95: mol_type = other RNA
tttggaggctgaatggggtcccccgactctggctttcccccaggtgtacatgttcctggtgaaatggcaggacctgtcggagaaggtggtgtacc

SEQ ID NO: 30711 - RNA, 95 nt, synthetic construct
  source 1..95: mol_type = other RNA
tttggaggctgaatggggtcccccgactctggctttcccccaggtgtacatgttcctggtgaaatggcaggacctgtcggagaaggtggtttacc

SEQ ID NO: 30712 - RNA, 95 nt, synthetic construct
  source 1..95: mol_type = other RNA
tttggaggctgaatggggtcccccgactctggctttcccccaggtctacatgttcctggtgaaatggcaggacctgtcggagaaggtggtatacc

SEQ ID NO: 30713 - RNA, 95 nt, synthetic construct
  source 1..95: mol_type = other RNA
tttggaggctgaatggggtcccccgactctggctttcccccaggtgtacatgttcctggtgaaatggcaggacctgtcggagaaggtggtctacc

SEQ ID NO: 30714 - RNA, 95 nt, synthetic construct
  source 1..95: mol_type = other RNA
tttggaggctgaatggggtcccccgactctggctttcccccaggtgtacatgttcctggtgaaatggcaggacctgtcggagaaggtggtatacc

SEQ ID NO: 30715 - RNA, 95 nt, synthetic construct
  source 1..95: mol_type = other RNA
tttggaggctgaatggggtcccccgactctggctttcccccaggtttacatgttcctggtgaaatggcaggacctgtcggagaaggtggtatacc

SEQ ID NO: 30716 - RNA, 95 nt, synthetic construct
  source 1..95: mol_type = other RNA
tttggaggctgaatggggtcccccgactctggctttcccccaggtctacatgttcctggtgaaatggcaggacctgtcggagaaggtggtttacc

SEQ ID NO: 30717 - RNA, 95 nt, synthetic construct
  source 1..95: mol_type = other RNA
tttggaggctgaatggggtcccccgactctggctttcccccaggtttacatgttcctggtgaaatggcaggacctgtcggagaaggtggtctacc

SEQ ID NO: 30718 - RNA, 95 nt, synthetic construct
  source 1..95: mol_type = other RNA
tttggaggctgaatggggtcccccgactctggctttcccccaggtatacatgttcctggtgaaatggcaggacctgtcggagaaggtggtatacc

SEQ ID NO: 30719 - RNA, 95 nt, synthetic construct
  source 1..95: mol_type = other RNA
tttggaggctgaatggggtcccccgactctggctttcccccaggtctacatgttcctggtgaaatggcaggacctgtcggagaaggtggtgtacc

SEQ ID NO: 30720 - RNA, 95 nt, synthetic construct
  source 1..95: mol_type = other RNA
tttggaggctgaatggggtcccccgactctggctttcccccaggtttacatgttcctggtgaaatggcaggacctgtcggagaaggtggtgtacc

SEQ ID NO: 30721 - RNA, 95 nt, synthetic construct
  source 1..95: mol_type = other RNA
tttggaggctgaatggggtcccccgactctggctttcccccaggtctacatgttcctggtgaaatggcaggacctgtcggagaaggtggtctacc

SEQ ID NO: 30722 - RNA, 95 nt, synthetic construct
  source 1..95: mol_type = other RNA
tttggaggctgaatggggtcccccgactctggctttcccccaggtatacatgttcctggtgaaatggcaggacctgtcggagaaggtggtgtacc

SEQ ID NO: 30723 - RNA, 95 nt, synthetic construct
  source 1..95: mol_type = other RNA
tttggaggctgaatggggtcccccgactctggctttcccccaggtatacatgttcctggtgaaatggcaggacctgtcggagaaggtggtctacc

SEQ ID NO: 30724 - RNA, 96 nt, synthetic construct
  source 1..96: mol_type = other RNA
ctttggaggctgaatggggtcccccgactctggctttcccccaggtgtacatgttcctggtgaaatggcaggacctgtcggagaaggtggtatacc

SEQ ID NO: 30725 - RNA, 96 nt, synthetic construct
  source 1..96: mol_type = other RNA
ctttggaggctgaatggggtcccccgactctggctttcccccaggtttacatgttcctggtgaaatggcaggacctgtcggagaaggtggtttacc

SEQ ID NO: 30726 - RNA, 96 nt, synthetic construct
  source 1..96: mol_type = other RNA
ctttggaggctgaatggggtcccccgactctggctttcccccaggtctacatgttcctggtgaaatggcaggacctgtcggagaaggtggtatacc

SEQ ID NO: 30727 - RNA, 96 nt, synthetic construct
  source 1..96: mol_type = other RNA
ctttggaggctgaatggggtcccccgactctggctttcccccaggtctacatgttcctggtgaaatggcaggacctgtcggagaaggtggtctacc

SEQ ID NO: 30728 - RNA, 96 nt, synthetic construct
  source 1..96: mol_type = other RNA
ctttggaggctgaatggggtcccccgactctggctttcccccaggtttacatgttcctggtgaaatggcaggacctgtcggagaaggtggtctacc

SEQ ID NO: 30729 - RNA, 96 nt, synthetic construct
  source 1..96: mol_type = other RNA
ctttggaggctgaatggggtcccccgactctggctttcccccaggtatacatgttcctggtgaaatggcaggacctgtcggagaaggtggtctacc

SEQ ID NO: 30730 - RNA, 96 nt, synthetic construct
  source 1..96: mol_type = other RNA
ctttggaggctgaatggggtcccccgactctggctttcccccaggtgtacatgttcctggtgaaatggcaggacctgtcggagaaggtggtgtacc

SEQ ID NO: 30731 - RNA, 96 nt, synthetic construct
  source 1..96: mol_type = other RNA
ctttggaggctgaatggggtcccccgactctggctttcccccaggtctacatgttcctggtgaaatggcaggacctgtcggagaaggtggtgtacc

SEQ ID NO: 30732 - RNA, 96 nt, synthetic construct
  source 1..96: mol_type = other RNA
ctttggaggctgaatggggtcccccgactctggctttcccccaggtatacatgttcctggtgaaatggcaggacctgtcggagaaggtggtgtacc

SEQ ID NO: 30733 - RNA, 96 nt, synthetic construct
  source 1..96: mol_type = other RNA
ctttggaggctgaatggggtcccccgactctggctttcccccaggtctacatgttcctggtgaaatggcaggacctgtcggagaaggtggtttacc

SEQ ID NO: 30734 - RNA, 96 nt, synthetic construct
  source 1..96: mol_type = other RNA
ctttggaggctgaatggggtcccccgactctggctttcccccaggtatacatgttcctggtgaaatggcaggacctgtcggagaaggtggtatacc

SEQ ID NO: 30735 - RNA, 96 nt, synthetic construct
  source 1..96: mol_type = other RNA
ctttggaggctgaatggggtcccccgactctggctttcccccaggtgtacatgttcctggtgaaatggcaggacctgtcggagaaggtggtctacc

SEQ ID NO: 30736 - RNA, 96 nt, synthetic construct
  source 1..96: mol_type = other RNA
ctttggaggctgaatggggtcccccgactctggctttcccccaggtttacatgttcctggtgaaatggcaggacctgtcggagaaggtggtatacc

SEQ ID NO: 30737 - RNA, 96 nt, synthetic construct
  source 1..96: mol_type = other RNA
ctttggaggctgaatggggtcccccgactctggctttcccccaggtgtacatgttcctggtgaaatggcaggacctgtcggagaaggtggtttacc

SEQ ID NO: 30738 - RNA, 96 nt, synthetic construct
  source 1..96: mol_type = other RNA
ctttggaggctgaatggggtcccccgactctggctttcccccaggtttacatgttcctggtgaaatggcaggacctgtcggagaaggtggtgtacc

SEQ ID NO: 30739 - RNA, 96 nt, synthetic construct
  source 1..96: mol_type = other RNA
ctttggaggctgaatggggtcccccgactctggctttcccccaggtatacatgttcctggtgaaatggcaggacctgtcggagaaggtggtttacc

SEQ ID NO: 30740 - RNA, 97 nt, synthetic construct
  source 1..97: mol_type = other RNA
tctttggaggctgaatggggtcccccgactctggctttcccccaggtatacatgttcctggtgaaatggcaggacctgtcggagaaggtggtctacc

SEQ ID NO: 30741 - RNA, 97 nt, synthetic construct
  source 1..97: mol_type = other RNA
tctttggaggctgaatggggtcccccgactctggctttcccccaggtatacatgttcctggtgaaatggcaggacctgtcggagaaggtggtttacc

SEQ ID NO: 30742 - RNA, 97 nt, synthetic construct
  source 1..97: mol_type = other RNA
tctttggaggctgaatggggtcccccgactctggctttcccccaggtgtacatgttcctggtgaaatggcaggacctgtcggagaaggtggtgtacc

SEQ ID NO: 30743 - RNA, 97 nt, synthetic construct
  source 1..97: mol_type = other RNA
tctttggaggctgaatggggtcccccgactctggctttcccccaggtctacatgttcctggtgaaatggcaggacctgtcggagaaggtggtgtacc

SEQ ID NO: 30744 - RNA, 97 nt, synthetic construct
  source 1..97: mol_type = other RNA
tctttggaggctgaatggggtcccccgactctggctttcccccaggtatacatgttcctggtgaaatggcaggacctgtcggagaaggtggtatacc

SEQ ID NO: 30745 - RNA, 97 nt, synthetic construct
  source 1..97: mol_type = other RNA
tctttggaggctgaatggggtcccccgactctggctttcccccaggtctacatgttcctggtgaaatggcaggacctgtcggagaaggtggtttacc

SEQ ID NO: 30746 - RNA, 97 nt, synthetic construct
  source 1..97: mol_type = other RNA
tctttggaggctgaatggggtcccccgactctggctttcccccaggtttacatgttcctggtgaaatggcaggacctgtcggagaaggtggtatacc

SEQ ID NO: 30747 - RNA, 97 nt, synthetic construct
  source 1..97: mol_type = other RNA
tctttggaggctgaatggggtcccccgactctggctttcccccaggtgtacatgttcctggtgaaatggcaggacctgtcggagaaggtggtctacc

SEQ ID NO: 30748 - RNA, 97 nt, synthetic construct
  source 1..97: mol_type = other RNA
tctttggaggctgaatggggtcccccgactctggctttcccccaggtctacatgttcctggtgaaatggcaggacctgtcggagaaggtggtatacc

SEQ ID NO: 30749 - RNA, 97 nt, synthetic construct
  source 1..97: mol_type = other RNA
tctttggaggctgaatggggtcccccgactctggctttcccccaggtgtacatgttcctggtgaaatggcaggacctgtcggagaaggtggtttacc

SEQ ID NO: 30750 - RNA, 97 nt, synthetic construct
  source 1..97: mol_type = other RNA
tctttggaggctgaatggggtcccccgactctggctttcccccaggtttacatgttcctggtgaaatggcaggacctgtcggagaaggtggtctacc

SEQ ID NO: 30751 - RNA, 97 nt, synthetic construct
  source 1..97: mol_type = other RNA
tctttggaggctgaatggggtcccccgactctggctttcccccaggtttacatgttcctggtgaaatggcaggacctgtcggagaaggtggtgtacc

SEQ ID NO: 30752 - RNA, 97 nt, synthetic construct
  source 1..97: mol_type = other RNA
tctttggaggctgaatggggtcccccgactctggctttcccccaggtgtacatgttcctggtgaaatggcaggacctgtcggagaaggtggtatacc

SEQ ID NO: 30753 - RNA, 97 nt, synthetic construct
  source 1..97: mol_type = other RNA
tctttggaggctgaatggggtcccccgactctggctttcccccaggtttacatgttcctggtgaaatggcaggacctgtcggagaaggtggtttacc

SEQ ID NO: 30754 - RNA, 97 nt, synthetic construct
  source 1..97: mol_type = other RNA
tctttggaggctgaatggggtcccccgactctggctttcccccaggtatacatgttcctggtgaaatggcaggacctgtcggagaaggtggtgtacc

SEQ ID NO: 30755 - RNA, 97 nt, synthetic construct
  source 1..97: mol_type = other RNA
tctttggaggctgaatggggtcccccgactctggctttcccccaggtctacatgttcctggtgaaatggcaggacctgtcggagaaggtggtctacc

SEQ ID NO: 30756 - RNA, 98 nt, synthetic construct
  source 1..98: mol_type = other RNA
ctctttggaggctgaatggggtcccccgactctggctttcccccaggtttacatgttcctggtgaaatggcaggacctgtcggagaaggtggtatacc

SEQ ID NO: 30757 - RNA, 98 nt, synthetic construct
  source 1..98: mol_type = other RNA
ctctttggaggctgaatggggtcccccgactctggctttcccccaggtatacatgttcctggtgaaatggcaggacctgtcggagaaggtggtatacc

SEQ ID NO: 30758 - RNA, 98 nt, synthetic construct
  source 1..98: mol_type = other RNA
ctctttggaggctgaatggggtcccccgactctggctttcccccaggtttacatgttcctggtgaaatggcaggacctgtcggagaaggtggtttacc

SEQ ID NO: 30759 - RNA, 98 nt, synthetic construct
  source 1..98: mol_type = other RNA
ctctttggaggctgaatggggtcccccgactctggctttcccccaggtttacatgttcctggtgaaatggcaggacctgtcggagaaggtggtgtacc

SEQ ID NO: 30760 - RNA, 98 nt, synthetic construct
  source 1..98: mol_type = other RNA
ctctttggaggctgaatggggtcccccgactctggctttcccccaggtgtacatgttcctggtgaaatggcaggacctgtcggagaaggtggtttacc

SEQ ID NO: 30761 - RNA, 98 nt, synthetic construct
  source 1..98: mol_type = other RNA
ctctttggaggctgaatggggtcccccgactctggctttcccccaggtttacatgttcctggtgaaatggcaggacctgtcggagaaggtggtctacc

SEQ ID NO: 30762 - RNA, 98 nt, synthetic construct
  source 1..98: mol_type = other RNA
ctctttggaggctgaatggggtcccccgactctggctttcccccaggtgtacatgttcctggtgaaatggcaggacctgtcggagaaggtggtatacc

SEQ ID NO: 30763 - RNA, 98 nt, synthetic construct
  source 1..98: mol_type = other RNA
ctctttggaggctgaatggggtcccccgactctggctttcccccaggtctacatgttcctggtgaaatggcaggacctgtcggagaaggtggtttacc

SEQ ID NO: 30764 - RNA, 98 nt, synthetic construct
  source 1..98: mol_type = other RNA
ctctttggaggctgaatggggtcccccgactctggctttcccccaggtctacatgttcctggtgaaatggcaggacctgtcggagaaggtggtgtacc

SEQ ID NO: 30765 - RNA, 98 nt, synthetic construct
  source 1..98: mol_type = other RNA
ctctttggaggctgaatggggtcccccgactctggctttcccccaggtctacatgttcctggtgaaatggcaggacctgtcggagaaggtggtctacc

SEQ ID NO: 30766 - RNA, 98 nt, synthetic construct
  source 1..98: mol_type = other RNA
ctctttggaggctgaatggggtcccccgactctggctttcccccaggtatacatgttcctggtgaaatggcaggacctgtcggagaaggtggtgtacc

SEQ ID NO: 30767 - RNA, 98 nt, synthetic construct
  source 1..98: mol_type = other RNA
ctctttggaggctgaatggggtcccccgactctggctttcccccaggtatacatgttcctggtgaaatggcaggacctgtcggagaaggtggtttacc

SEQ ID NO: 30768 - RNA, 98 nt, synthetic construct
  source 1..98: mol_type = other RNA
ctctttggaggctgaatggggtcccccgactctggctttcccccaggtgtacatgttcctggtgaaatggcaggacctgtcggagaaggtggtgtacc

SEQ ID NO: 30769 - RNA, 98 nt, synthetic construct
  source 1..98: mol_type = other RNA
ctctttggaggctgaatggggtcccccgactctggctttcccccaggtatacatgttcctggtgaaatggcaggacctgtcggagaaggtggtctacc

SEQ ID NO: 30770 - RNA, 98 nt, synthetic construct
  source 1..98: mol_type = other RNA
ctctttggaggctgaatggggtcccccgactctggctttcccccaggtctacatgttcctggtgaaatggcaggacctgtcggagaaggtggtatacc

SEQ ID NO: 30771 - RNA, 98 nt, synthetic construct
  source 1..98: mol_type = other RNA
ctctttggaggctgaatggggtcccccgactctggctttcccccaggtgtacatgttcctggtgaaatggcaggacctgtcggagaaggtggtctacc

SEQ ID NO: 30772 - RNA, 99 nt, synthetic construct
  source 1..99: mol_type = other RNA
cctctttggaggctgaatggggtcccccgactctggctttcccccaggtgtacatgttcctggtgaaatggcaggacctgtcggagaaggtggtctacc

SEQ ID NO: 30773 - RNA, 99 nt, synthetic construct
  source 1..99: mol_type = other RNA
cctctttggaggctgaatggggtcccccgactctggctttcccccaggtatacatgttcctggtgaaatggcaggacctgtcggagaaggtggtctacc

SEQ ID NO: 30774 - RNA, 99 nt, synthetic construct
  source 1..99: mol_type = other RNA
cctctttggaggctgaatggggtcccccgactctggctttcccccaggtgtacatgttcctggtgaaatggcaggacctgtcggagaaggtggtgtacc

SEQ ID NO: 30775 - RNA, 99 nt, synthetic construct
  source 1..99: mol_type = other RNA
cctctttggaggctgaatggggtcccccgactctggctttcccccaggtgtacatgttcctggtgaaatggcaggacctgtcggagaaggtggtttacc

SEQ ID NO: 30776 - RNA, 99 nt, synthetic construct
  source 1..99: mol_type = other RNA
cctctttggaggctgaatggggtcccccgactctggctttcccccaggtctacatgttcctggtgaaatggcaggacctgtcggagaaggtggtatacc

SEQ ID NO: 30777 - RNA, 99 nt, synthetic construct
  source 1..99: mol_type = other RNA
cctctttggaggctgaatggggtcccccgactctggctttcccccaggtttacatgttcctggtgaaatggcaggacctgtcggagaaggtggtatacc

SEQ ID NO: 30778 - RNA, 99 nt, synthetic construct
  source 1..99: mol_type = other RNA
cctctttggaggctgaatggggtcccccgactctggctttcccccaggtttacatgttcctggtgaaatggcaggacctgtcggagaaggtggtctacc

SEQ ID NO: 30779 - RNA, 99 nt, synthetic construct
  source 1..99: mol_type = other RNA
cctctttggaggctgaatggggtcccccgactctggctttcccccaggtttacatgttcctggtgaaatggcaggacctgtcggagaaggtggtgtacc

SEQ ID NO: 30780 - RNA, 99 nt, synthetic construct
  source 1..99: mol_type = other RNA
cctctttggaggctgaatggggtcccccgactctggctttcccccaggtttacatgttcctggtgaaatggcaggacctgtcggagaaggtggtttacc

SEQ ID NO: 30781 - RNA, 99 nt, synthetic construct
  source 1..99: mol_type = other RNA
cctctttggaggctgaatggggtcccccgactctggctttcccccaggtctacatgttcctggtgaaatggcaggacctgtcggagaaggtggtgtacc

SEQ ID NO: 30782 - RNA, 99 nt, synthetic construct
  source 1..99: mol_type = other RNA
cctctttggaggctgaatggggtcccccgactctggctttcccccaggtatacatgttcctggtgaaatggcaggacctgtcggagaaggtggtatacc

SEQ ID NO: 30783 - RNA, 99 nt, synthetic construct
  source 1..99: mol_type = other RNA
cctctttggaggctgaatggggtcccccgactctggctttcccccaggtctacatgttcctggtgaaatggcaggacctgtcggagaaggtggtctacc

SEQ ID NO: 30784 - RNA, 99 nt, synthetic construct
  source 1..99: mol_type = other RNA
cctctttggaggctgaatggggtcccccgactctggctttcccccaggtatacatgttcctggtgaaatggcaggacctgtcggagaaggtggtttacc

SEQ ID NO: 30785 - RNA, 99 nt, synthetic construct
  source 1..99: mol_type = other RNA
cctctttggaggctgaatggggtcccccgactctggctttcccccaggtctacatgttcctggtgaaatggcaggacctgtcggagaaggtggtttacc

SEQ ID NO: 30786 - RNA, 99 nt, synthetic construct
  source 1..99: mol_type = other RNA
cctctttggaggctgaatggggtcccccgactctggctttcccccaggtatacatgttcctggtgaaatggcaggacctgtcggagaaggtggtgtacc

SEQ ID NO: 30787 - RNA, 99 nt, synthetic construct
  source 1..99: mol_type = other RNA
cctctttggaggctgaatggggtcccccgactctggctttcccccaggtgtacatgttcctggtgaaatggcaggacctgtcggagaaggtggtatacc

SEQ ID NO: 30788 - RNA, 100 nt, synthetic construct
  source 1..100: mol_type = other RNA
gcctctttggaggctgaatggggtcccccgactctggctttcccccaggtatacatgttcctggtgaaatggcaggacctgtcggagaaggtggtgtacc

SEQ ID NO: 30789 - RNA, 100 nt, synthetic construct
  source 1..100: mol_type = other RNA
gcctctttggaggctgaatggggtcccccgactctggctttcccccaggtatacatgttcctggtgaaatggcaggacctgtcggagaaggtggtctacc

SEQ ID NO: 30790 - RNA, 100 nt, synthetic construct
  source 1..100: mol_type = other RNA
gcctctttggaggctgaatggggtcccccgactctggctttcccccaggtatacatgttcctggtgaaatggcaggacctgtcggagaaggtggtatacc

SEQ ID NO: 30791 - RNA, 100 nt, synthetic construct
  source 1..100: mol_type = other RNA
gcctctttggaggctgaatggggtcccccgactctggctttcccccaggtttacatgttcctggtgaaatggcaggacctgtcggagaaggtggtctacc

SEQ ID NO: 30792 - RNA, 100 nt, synthetic construct
  source 1..100: mol_type = other RNA
gcctctttggaggctgaatggggtcccccgactctggctttcccccaggtttacatgttcctggtgaaatggcaggacctgtcggagaaggtggtatacc

SEQ ID NO: 30793 - RNA, 100 nt, synthetic construct
  source 1..100: mol_type = other RNA
gcctctttggaggctgaatggggtcccccgactctggctttcccccaggtatacatgttcctggtgaaatggcaggacctgtcggagaaggtggtttacc

SEQ ID NO: 30794 - RNA, 100 nt, synthetic construct
  source 1..100: mol_type = other RNA
gcctctttggaggctgaatggggtcccccgactctggctttcccccaggtctacatgttcctggtgaaatggcaggacctgtcggagaaggtggtgtacc

SEQ ID NO: 30795 - RNA, 100 nt, synthetic construct
  source 1..100: mol_type = other RNA
gcctctttggaggctgaatggggtcccccgactctggctttcccccaggtctacatgttcctggtgaaatggcaggacctgtcggagaaggtggtatacc

SEQ ID NO: 30796 - RNA, 100 nt, synthetic construct
  source 1..100: mol_type = other RNA
gcctctttggaggctgaatggggtcccccgactctggctttcccccaggtgtacatgttcctggtgaaatggcaggacctgtcggagaaggtggtgtacc

SEQ ID NO: 30797 - RNA, 100 nt, synthetic construct
  source 1..100: mol_type = other RNA
gcctctttggaggctgaatggggtcccccgactctggctttcccccaggtctacatgttcctggtgaaatggcaggacctgtcggagaaggtggtttacc

SEQ ID NO: 30798 - RNA, 100 nt, synthetic construct
  source 1..100: mol_type = other RNA
gcctctttggaggctgaatggggtcccccgactctggctttcccccaggtgtacatgttcctggtgaaatggcaggacctgtcggagaaggtggtatacc

SEQ ID NO: 30799 - RNA, 100 nt, synthetic construct
  source 1..100: mol_type = other RNA
gcctctttggaggctgaatggggtcccccgactctggctttcccccaggtgtacatgttcctggtgaaatggcaggacctgtcggagaaggtggtctacc

SEQ ID NO: 30800 - RNA, 100 nt, synthetic construct
  source 1..100: mol_type = other RNA
gcctctttggaggctgaatggggtcccccgactctggctttcccccaggtgtacatgttcctggtgaaatggcaggacctgtcggagaaggtggtttacc

SEQ ID NO: 30801 - RNA, 100 nt, synthetic construct
  source 1..100: mol_type = other RNA
gcctctttggaggctgaatggggtcccccgactctggctttcccccaggtttacatgttcctggtgaaatggcaggacctgtcggagaaggtggtgtacc

SEQ ID NO: 30802 - RNA, 100 nt, synthetic construct
  source 1..100: mol_type = other RNA
gcctctttggaggctgaatggggtcccccgactctggctttcccccaggtctacatgttcctggtgaaatggcaggacctgtcggagaaggtggtctacc

SEQ ID NO: 30803 - RNA, 100 nt, synthetic construct
  source 1..100: mol_type = other RNA
gcctctttggaggctgaatggggtcccccgactctggctttcccccaggtttacatgttcctggtgaaatggcaggacctgtcggagaaggtggtttacc

SEQ ID NO: 30804 - RNA, 101 nt, synthetic construct
  source 1..101: mol_type = other RNA
agcctctttggaggctgaatggggtcccccgactctggctttcccccaggtttacatgttcctggtgaaatggcaggacctgtcggagaaggtggtgtacc

SEQ ID NO: 30805 - RNA, 101 nt, synthetic construct
  source 1..101: mol_type = other RNA
agcctctttggaggctgaatggggtcccccgactctggctttcccccaggtctacatgttcctggtgaaatggcaggacctgtcggagaaggtggtttacc

SEQ ID NO: 30806 - RNA, 101 nt, synthetic construct
  source 1..101: mol_type = other RNA
agcctctttggaggctgaatggggtcccccgactctggctttcccccaggtttacatgttcctggtgaaatggcaggacctgtcggagaaggtggtatacc

SEQ ID NO: 30807 - RNA, 101 nt, synthetic construct
  source 1..101: mol_type = other RNA
agcctctttggaggctgaatggggtcccccgactctggctttcccccaggtgtacatgttcctggtgaaatggcaggacctgtcggagaaggtggtttacc

SEQ ID NO: 30808 - RNA, 101 nt, synthetic construct
  source 1..101: mol_type = other RNA
agcctctttggaggctgaatggggtcccccgactctggctttcccccaggtgtacatgttcctggtgaaatggcaggacctgtcggagaaggtggtgtacc

SEQ ID NO: 30809 - RNA, 101 nt, synthetic construct
  source 1..101: mol_type = other RNA
agcctctttggaggctgaatggggtcccccgactctggctttcccccaggtgtacatgttcctggtgaaatggcaggacctgtcggagaaggtggtctacc

SEQ ID NO: 30810 - RNA, 101 nt, synthetic construct
  source 1..101: mol_type = other RNA
agcctctttggaggctgaatggggtcccccgactctggctttcccccaggtctacatgttcctggtgaaatggcaggacctgtcggagaaggtggtgtacc

SEQ ID NO: 30811 - RNA, 101 nt, synthetic construct
  source 1..101: mol_type = other RNA
agcctctttggaggctgaatggggtcccccgactctggctttcccccaggtctacatgttcctggtgaaatggcaggacctgtcggagaaggtggtatacc

SEQ ID NO: 30812 - RNA, 101 nt, synthetic construct
  source 1..101: mol_type = other RNA
agcctctttggaggctgaatggggtcccccgactctggctttcccccaggtatacatgttcctggtgaaatggcaggacctgtcggagaaggtggtgtacc

SEQ ID NO: 30813 - RNA, 101 nt, synthetic construct
  source 1..101: mol_type = other RNA
agcctctttggaggctgaatggggtcccccgactctggctttcccccaggtatacatgttcctggtgaaatggcaggacctgtcggagaaggtggtctacc

SEQ ID NO: 30814 - RNA, 101 nt, synthetic construct
  source 1..101: mol_type = other RNA
agcctctttggaggctgaatggggtcccccgactctggctttcccccaggtatacatgttcctggtgaaatggcaggacctgtcggagaaggtggtatacc

SEQ ID NO: 30815 - RNA, 101 nt, synthetic construct
  source 1..101: mol_type = other RNA
agcctctttggaggctgaatggggtcccccgactctggctttcccccaggtttacatgttcctggtgaaatggcaggacctgtcggagaaggtggtttacc

SEQ ID NO: 30816 - RNA, 101 nt, synthetic construct
  source 1..101: mol_type = other RNA
agcctctttggaggctgaatggggtcccccgactctggctttcccccaggtctacatgttcctggtgaaatggcaggacctgtcggagaaggtggtctacc

SEQ ID NO: 30817 - RNA, 101 nt, synthetic construct
  source 1..101: mol_type = other RNA
agcctctttggaggctgaatggggtcccccgactctggctttcccccaggtttacatgttcctggtgaaatggcaggacctgtcggagaaggtggtctacc

SEQ ID NO: 30818 - RNA, 101 nt, synthetic construct
  source 1..101: mol_type = other RNA
agcctctttggaggctgaatggggtcccccgactctggctttcccccaggtatacatgttcctggtgaaatggcaggacctgtcggagaaggtggtttacc

SEQ ID NO: 30819 - RNA, 101 nt, synthetic construct
  source 1..101: mol_type = other RNA
agcctctttggaggctgaatggggtcccccgactctggctttcccccaggtgtacatgttcctggtgaaatggcaggacctgtcggagaaggtggtatacc

SEQ ID NO: 30820 - RNA, 102 nt, synthetic construct
  source 1..102: mol_type = other RNA
aagcctctttggaggctgaatggggtcccccgactctggctttcccccaggtctacatgttcctggtgaaatggcaggacctgtcggagaaggtggtttacc

SEQ ID NO: 30821 - RNA, 102 nt, synthetic construct
  source 1..102: mol_type = other RNA
aagcctctttggaggctgaatggggtcccccgactctggctttcccccaggtgtacatgttcctggtgaaatggcaggacctgtcggagaaggtggtgtacc

SEQ ID NO: 30822 - RNA, 102 nt, synthetic construct
  source 1..102: mol_type = other RNA
aagcctctttggaggctgaatggggtcccccgactctggctttcccccaggtgtacatgttcctggtgaaatggcaggacctgtcggagaaggtggtctacc

SEQ ID NO: 30823 - RNA, 102 nt, synthetic construct
  source 1..102: mol_type = other RNA
aagcctctttggaggctgaatggggtcccccgactctggctttcccccaggtttacatgttcctggtgaaatggcaggacctgtcggagaaggtggtatacc

SEQ ID NO: 30824 - RNA, 102 nt, synthetic construct
  source 1..102: mol_type = other RNA
aagcctctttggaggctgaatggggtcccccgactctggctttcccccaggtttacatgttcctggtgaaatggcaggacctgtcggagaaggtggtctacc

SEQ ID NO: 30825 - RNA, 102 nt, synthetic construct
  source 1..102: mol_type = other RNA
aagcctctttggaggctgaatggggtcccccgactctggctttcccccaggtttacatgttcctggtgaaatggcaggacctgtcggagaaggtggtgtacc

SEQ ID NO: 30826 - RNA, 102 nt, synthetic construct
  source 1..102: mol_type = other RNA
aagcctctttggaggctgaatggggtcccccgactctggctttcccccaggtttacatgttcctggtgaaatggcaggacctgtcggagaaggtggtttacc

SEQ ID NO: 30827 - RNA, 102 nt, synthetic construct
  source 1..102: mol_type = other RNA
aagcctctttggaggctgaatggggtcccccgactctggctttcccccaggtatacatgttcctggtgaaatggcaggacctgtcggagaaggtggtatacc

SEQ ID NO: 30828 - RNA, 102 nt, synthetic construct
  source 1..102: mol_type = other RNA
aagcctctttggaggctgaatggggtcccccgactctggctttcccccaggtgtacatgttcctggtgaaatggcaggacctgtcggagaaggtggtttacc

SEQ ID NO: 30829 - RNA, 102 nt, synthetic construct
  source 1..102: mol_type = other RNA
aagcctctttggaggctgaatggggtcccccgactctggctttcccccaggtatacatgttcctggtgaaatggcaggacctgtcggagaaggtggtctacc

SEQ ID NO: 30830 - RNA, 102 nt, synthetic construct
  source 1..102: mol_type = other RNA
aagcctctttggaggctgaatggggtcccccgactctggctttcccccaggtctacatgttcctggtgaaatggcaggacctgtcggagaaggtggtgtacc

SEQ ID NO: 30831 - RNA, 102 nt, synthetic construct
  source 1..102: mol_type = other RNA
aagcctctttggaggctgaatggggtcccccgactctggctttcccccaggtctacatgttcctggtgaaatggcaggacctgtcggagaaggtggtctacc

SEQ ID NO: 30832 - RNA, 102 nt, synthetic construct
  source 1..102: mol_type = other RNA
aagcctctttggaggctgaatggggtcccccgactctggctttcccccaggtatacatgttcctggtgaaatggcaggacctgtcggagaaggtggtttacc

SEQ ID NO: 30833 - RNA, 102 nt, synthetic construct
  source 1..102: mol_type = other RNA
aagcctctttggaggctgaatggggtcccccgactctggctttcccccaggtctacatgttcctggtgaaatggcaggacctgtcggagaaggtggtatacc

SEQ ID NO: 30834 - RNA, 102 nt, synthetic construct
  source 1..102: mol_type = other RNA
aagcctctttggaggctgaatggggtcccccgactctggctttcccccaggtgtacatgttcctggtgaaatggcaggacctgtcggagaaggtggtatacc

SEQ ID NO: 30835 - RNA, 102 nt, synthetic construct
  source 1..102: mol_type = other RNA
aagcctctttggaggctgaatggggtcccccgactctggctttcccccaggtatacatgttcctggtgaaatggcaggacctgtcggagaaggtggtgtacc

SEQ ID NO: 30836 - RNA, 103 nt, synthetic construct
  source 1..103: mol_type = other RNA
aaagcctctttggaggctgaatggggtcccccgactctggctttcccccaggtctacatgttcctggtgaaatggcaggacctgtcggagaaggtggtttacc

SEQ ID NO: 30837 - RNA, 103 nt, synthetic construct
  source 1..103: mol_type = other RNA
aaagcctctttggaggctgaatggggtcccccgactctggctttcccccaggtgtacatgttcctggtgaaatggcaggacctgtcggagaaggtggtatacc

SEQ ID NO: 30838 - RNA, 103 nt, synthetic construct
  source 1..103: mol_type = other RNA
aaagcctctttggaggctgaatggggtcccccgactctggctttcccccaggtttacatgttcctggtgaaatggcaggacctgtcggagaaggtggtatacc

SEQ ID NO: 30839 - RNA, 103 nt, synthetic construct
  source 1..103: mol_type = other RNA
aaagcctctttggaggctgaatggggtcccccgactctggctttcccccaggtgtacatgttcctggtgaaatggcaggacctgtcggagaaggtggtttacc

SEQ ID NO: 30840 - RNA, 103 nt, synthetic construct
  source 1..103: mol_type = other RNA
aaagcctctttggaggctgaatggggtcccccgactctggctttcccccaggtttacatgttcctggtgaaatggcaggacctgtcggagaaggtggtgtacc

SEQ ID NO: 30841 - RNA, 103 nt, synthetic construct
  source 1..103: mol_type = other RNA
aaagcctctttggaggctgaatggggtcccccgactctggctttcccccaggtctacatgttcctggtgaaatggcaggacctgtcggagaaggtggtgtacc

SEQ ID NO: 30842 - RNA, 103 nt, synthetic construct
  source 1..103: mol_type = other RNA
aaagcctctttggaggctgaatggggtcccccgactctggctttcccccaggtttacatgttcctggtgaaatggcaggacctgtcggagaaggtggtttacc

SEQ ID NO: 30843 - RNA, 103 nt, synthetic construct
  source 1..103: mol_type = other RNA
aaagcctctttggaggctgaatggggtcccccgactctggctttcccccaggtatacatgttcctggtgaaatggcaggacctgtcggagaaggtggtctacc

SEQ ID NO: 30844 - RNA, 103 nt, synthetic construct
  source 1..103: mol_type = other RNA
aaagcctctttggaggctgaatggggtcccccgactctggctttcccccaggtatacatgttcctggtgaaatggcaggacctgtcggagaaggtggtgtacc

SEQ ID NO: 30845 - RNA, 103 nt, synthetic construct
  source 1..103: mol_type = other RNA
aaagcctctttggaggctgaatggggtcccccgactctggctttcccccaggtgtacatgttcctggtgaaatggcaggacctgtcggagaaggtggtgtacc

SEQ ID NO: 30846 - RNA, 103 nt, synthetic construct
  source 1..103: mol_type = other RNA
aaagcctctttggaggctgaatggggtcccccgactctggctttcccccaggtctacatgttcctggtgaaatggcaggacctgtcggagaaggtggtatacc

SEQ ID NO: 30847 - RNA, 103 nt, synthetic construct
  source 1..103: mol_type = other RNA
aaagcctctttggaggctgaatggggtcccccgactctggctttcccccaggtctacatgttcctggtgaaatggcaggacctgtcggagaaggtggtctacc

SEQ ID NO: 30848 - RNA, 103 nt, synthetic construct
  source 1..103: mol_type = other RNA
aaagcctctttggaggctgaatggggtcccccgactctggctttcccccaggtatacatgttcctggtgaaatggcaggacctgtcggagaaggtggtatacc

SEQ ID NO: 30849 - RNA, 103 nt, synthetic construct
  source 1..103: mol_type = other RNA
aaagcctctttggaggctgaatggggtcccccgactctggctttcccccaggtttacatgttcctggtgaaatggcaggacctgtcggagaaggtggtctacc

SEQ ID NO: 30850 - RNA, 103 nt, synthetic construct
  source 1..103: mol_type = other RNA
aaagcctctttggaggctgaatggggtcccccgactctggctttcccccaggtgtacatgttcctggtgaaatggcaggacctgtcggagaaggtggtctacc

SEQ ID NO: 30851 - RNA, 103 nt, synthetic construct
  source 1..103: mol_type = other RNA
aaagcctctttggaggctgaatggggtcccccgactctggctttcccccaggtatacatgttcctggtgaaatggcaggacctgtcggagaaggtggtttacc

SEQ ID NO: 30852 - RNA, 20 nt, synthetic construct
  source 1..20: mol_type = other RNA
cggagaaggtggtttaccgg

SEQ ID NO: 30853 - RNA, 20 nt, synthetic construct
  source 1..20: mol_type = other RNA
cggagaaggtggtataccgg

SEQ ID NO: 30854 - RNA, 20 nt, synthetic construct
  source 1..20: mol_type = other RNA
cggagaaggtggtgtaccgg

SEQ ID NO: 30855 - RNA, 20 nt, synthetic construct
  source 1..20: mol_type = other RNA
tgtcggagaaggtggtttac

SEQ ID NO: 30856 - RNA, 20 nt, synthetic construct
  source 1..20: mol_type = other RNA
tgtcggagaaggtggtatac

SEQ ID NO: 30857 - RNA, 20 nt, synthetic construct
  source 1..20: mol_type = other RNA
tgtcggagaaggtggtgtac

SEQ ID NO: 30858 - RNA, 20 nt, synthetic construct
  source 1..20: mol_type = other RNA
gtcggagaaggtggtgtacc

SEQ ID NO: 30859 - RNA, 20 nt, synthetic construct
  source 1..20: mol_type = other RNA
gtcggagaaggtggtttacc

SEQ ID NO: 30860 - RNA, 20 nt, synthetic construct
  source 1..20: mol_type = other RNA
gtcggagaaggtggtatacc

SEQ ID NO: 30861 - RNA, 16 nt, synthetic construct
  source 1..16: mol_type = other RNA
gatcctgggtgcacac

SEQ ID NO: 30862 - RNA, 17 nt, synthetic construct
  source 1..17: mol_type = other RNA
ggatcctgggtgcacac

SEQ ID NO: 30863 - RNA, 18 nt, synthetic construct
  source 1..18: mol_type = other RNA
gggatcctgggtgcacac

SEQ ID NO: 30864 - RNA, 19 nt, synthetic construct
  source 1..19: mol_type = other RNA
tgggatcctgggtgcacac

SEQ ID NO: 30865 - RNA, 20 nt, synthetic construct
  source 1..20: mol_type = other RNA
gtgggatcctgggtgcacac

SEQ ID NO: 30866 - RNA, 21 nt, synthetic construct
  source 1..21: mol_type = other RNA
agtgggatcctgggtgcacac

SEQ ID NO: 30867 - RNA, 22 nt, synthetic construct
  source 1..22: mol_type = other RNA
tagtgggatcctgggtgcacac

SEQ ID NO: 30868-30874 - skipped (7 entries)

SEQ ID NO: 30875 - RNA, 10 nt, synthetic construct
  source 1..10: mol_type = other RNA
tgcacccagg

SEQ ID NO: 30876 - RNA, 11 nt, synthetic construct
  source 1..11: mol_type = other RNA
tgcacccagga

SEQ ID NO: 30877 - RNA, 12 nt, synthetic construct
  source 1..12: mol_type = other RNA
tgcacccaggat

SEQ ID NO: 30878 - RNA, 13 nt, synthetic construct
  source 1..13: mol_type = other RNA
tgcacccaggatc

SEQ ID NO: 30879 - RNA, 14 nt, synthetic construct
  source 1..14: mol_type = other RNA
tgcacccaggatcc

SEQ ID NO: 30880 - RNA, 15 nt, synthetic construct
  source 1..15: mol_type = other RNA
tgcacccaggatccc

SEQ ID NO: 30881 - RNA, 16 nt, synthetic construct
  source 1..16: mol_type = other RNA
tgcacccaggatccca

SEQ ID NO: 30882 - RNA, 17 nt, synthetic construct
  source 1..17: mol_type = other RNA
tgcacccaggatcccac

SEQ ID NO: 30883 - RNA, 18 nt, synthetic construct
  source 1..18: mol_type = other RNA
tgcacccaggatcccact

SEQ ID NO: 30884 - RNA, 19 nt, synthetic construct
  source 1..19: mol_type = other RNA
tgcacccaggatcccacta

SEQ ID NO: 30885 - RNA, 59 nt, synthetic construct
  source 1..59: mol_type = other RNA
acctgggggaaagccagagtcgggggaccccattcagcctccaaagaggctttgctgtg

SEQ ID NO: 30886 - RNA, 60 nt, synthetic construct
  source 1..60: mol_type = other RNA
aacctgggggaaagccagagtcgggggaccccattcagcctccaaagaggctttgctgtg

SEQ ID NO: 30887 - RNA, 60 nt, synthetic construct
  source 1..60: mol_type = other RNA
gacctgggggaaagccagagtcgggggaccccattcagcctccaaagaggctttgctgtg

SEQ ID NO: 30888 - RNA, 60 nt, synthetic construct
  source 1..60: mol_type = other RNA
cacctgggggaaagccagagtcgggggaccccattcagcctccaaagaggctttgctgtg

SEQ ID NO: 30889 - RNA, 60 nt, synthetic construct
  source 1..60: mol_type = other RNA
tacctgggggaaagccagagtcgggggaccccattcagcctccaaagaggctttgctgtg

SEQ ID NO: 30890 - RNA, 61 nt, synthetic construct
  source 1..61: mol_type = other RNA
atacctgggggaaagccagagtcgggggaccccattcagcctccaaagaggctttgctgtg

SEQ ID NO: 30891 - RNA, 61 nt, synthetic construct
  source 1..61: mol_type = other RNA
agacctgggggaaagccagagtcgggggaccccattcagcctccaaagaggctttgctgtg

SEQ ID NO: 30892 - RNA, 61 nt, synthetic construct
  source 1..61: mol_type = other RNA
acacctgggggaaagccagagtcgggggaccccattcagcctccaaagaggctttgctgtg

SEQ ID NO: 30893 - RNA, 61 nt, synthetic construct
  source 1..61: mol_type = other RNA
aaacctgggggaaagccagagtcgggggaccccattcagcctccaaagaggctttgctgtg

SEQ ID NO: 30894 - RNA, 62 nt, synthetic construct
  source 1..62: mol_type = other RNA
tatacctgggggaaagccagagtcgggggaccccattcagcctccaaagaggctttgctgtg

SEQ ID NO: 30895 - RNA, 62 nt, synthetic construct
  source 1..62: mol_type = other RNA
tagacctgggggaaagccagagtcgggggaccccattcagcctccaaagaggctttgctgtg

SEQ ID NO: 30896 - RNA, 62 nt, synthetic construct
  source 1..62: mol_type = other RNA
taaacctgggggaaagccagagtcgggggaccccattcagcctccaaagaggctttgctgtg

SEQ ID NO: 30897 - RNA, 62 nt, synthetic construct
  source 1..62: mol_type = other RNA
tacacctgggggaaagccagagtcgggggaccccattcagcctccaaagaggctttgctgtg

SEQ ID NO: 30898 - RNA, 63 nt, synthetic construct
  source 1..63: mol_type = other RNA
gtagacctgggggaaagccagagtcgggggaccccattcagcctccaaagaggctttgctgtg

SEQ ID NO: 30899 - RNA, 63 nt, synthetic construct
  source 1..63: mol_type = other RNA
gtacacctgggggaaagccagagtcgggggaccccattcagcctccaaagaggctttgctgtg

SEQ ID NO: 30900 - RNA, 63 nt, synthetic construct
  source 1..63: mol_type = other RNA
gtatacctgggggaaagccagagtcgggggaccccattcagcctccaaagaggctttgctgtg

SEQ ID NO: 30901 - RNA, 63 nt, synthetic construct
  source 1..63: mol_type = other RNA
gtaaacctgggggaaagccagagtcgggggaccccattcagcctccaaagaggctttgctgtg

SEQ ID NO: 30902 - RNA, 64 nt, synthetic construct
  source 1..64: mol_type = other RNA
tgtaaacctgggggaaagccagagtcgggggaccccattcagcctccaaagaggctttgctgtg

SEQ ID NO: 30903 - RNA, 64 nt, synthetic construct
  source 1..64: mol_type = other RNA
tgtacacctgggggaaagccagagtcgggggaccccattcagcctccaaagaggctttgctgtg

SEQ ID NO: 30904 - RNA, 64 nt, synthetic construct
  source 1..64: mol_type = other RNA
tgtatacctgggggaaagccagagtcgggggaccccattcagcctccaaagaggctttgctgtg

SEQ ID NO: 30905 - RNA, 64 nt, synthetic construct
  source 1..64: mol_type = other RNA
tgtagacctgggggaaagccagagtcgggggaccccattcagcctccaaagaggctttgctgtg

SEQ ID NO: 30906 - RNA, 65 nt, synthetic construct
  source 1..65: mol_type = other RNA
atgtagacctgggggaaagccagagtcgggggaccccattcagcctccaaagaggctttgctgtg

SEQ ID NO: 30907 - RNA, 65 nt, synthetic construct
  source 1..65: mol_type = other RNA
atgtaaacctgggggaaagccagagtcgggggaccccattcagcctccaaagaggctttgctgtg

SEQ ID NO: 30908 - RNA, 65 nt, synthetic construct
  source 1..65: mol_type = other RNA
atgtacacctgggggaaagccagagtcgggggaccccattcagcctccaaagaggctttgctgtg

SEQ ID NO: 30909 - RNA, 65 nt, synthetic construct
  source 1..65: mol_type = other RNA
atgtatacctgggggaaagccagagtcgggggaccccattcagcctccaaagaggctttgctgtg

SEQ ID NO: 30910 - RNA, 66 nt, synthetic construct
  source 1..66: mol_type = other RNA
catgtacacctgggggaaagccagagtcgggggaccccattcagcctccaaagaggctttgctgtg

SEQ ID NO: 30911 - RNA, 66 nt, synthetic construct
  source 1..66: mol_type = other RNA
catgtagacctgggggaaagccagagtcgggggaccccattcagcctccaaagaggctttgctgtg

SEQ ID NO: 30912 - RNA, 66 nt, synthetic construct
  source 1..66: mol_type = other RNA
catgtatacctgggggaaagccagagtcgggggaccccattcagcctccaaagaggctttgctgtg

SEQ ID NO: 30913 - RNA, 66 nt, synthetic construct
  source 1..66: mol_type = other RNA
catgtaaacctgggggaaagccagagtcgggggaccccattcagcctccaaagaggctttgctgtg

SEQ ID NO: 30914 - RNA, 67 nt, synthetic construct
  source 1..67: mol_type = other RNA
acatgtagacctgggggaaagccagagtcgggggaccccattcagcctccaaagaggctttgctgtg

SEQ ID NO: 30915 - RNA, 67 nt, synthetic construct
  source 1..67: mol_type = other RNA
acatgtaaacctgggggaaagccagagtcgggggaccccattcagcctccaaagaggctttgctgtg

SEQ ID NO: 30916 - RNA, 67 nt, synthetic construct
  source 1..67: mol_type = other RNA
acatgtacacctgggggaaagccagagtcgggggaccccattcagcctccaaagaggctttgctgtg

SEQ ID NO: 30917 - RNA, 67 nt, synthetic construct
  source 1..67: mol_type = other RNA
acatgtatacctgggggaaagccagagtcgggggaccccattcagcctccaaagaggctttgctgtg

SEQ ID NO: 30918 - RNA, 68 nt, synthetic construct
  source 1..68: mol_type = other RNA
aacatgtagacctgggggaaagccagagtcgggggaccccattcagcctccaaagaggctttgctgtg

SEQ ID NO: 30919 - RNA, 68 nt, synthetic construct
  source 1..68: mol_type = other RNA
aacatgtaaacctgggggaaagccagagtcgggggaccccattcagcctccaaagaggctttgctgtg

SEQ ID NO: 30920 - RNA, 68 nt, synthetic construct
  source 1..68: mol_type = other RNA
aacatgtacacctgggggaaagccagagtcgggggaccccattcagcctccaaagaggctttgctgtg

SEQ ID NO: 30921 - RNA, 68 nt, synthetic construct
  source 1..68: mol_type = other RNA
aacatgtatacctgggggaaagccagagtcgggggaccccattcagcctccaaagaggctttgctgtg

SEQ ID NO: 30922 - RNA, 69 nt, synthetic construct
  source 1..69: mol_type = other RNA
gaacatgtatacctgggggaaagccagagtcgggggaccccattcagcctccaaagaggctttgctgtg

SEQ ID NO: 30923 - RNA, 69 nt, synthetic construct
  source 1..69: mol_type = other RNA
gaacatgtaaacctgggggaaagccagagtcgggggaccccattcagcctccaaagaggctttgctgtg

SEQ ID NO: 30924 - RNA, 69 nt, synthetic construct
  source 1..69: mol_type = other RNA
gaacatgtacacctgggggaaagccagagtcgggggaccccattcagcctccaaagaggctttgctgtg

SEQ ID NO: 30925 - RNA, 69 nt, synthetic construct
  source 1..69: mol_type = other RNA
gaacatgtagacctgggggaaagccagagtcgggggaccccattcagcctccaaagaggctttgctgtg

SEQ ID NO: 30926 - RNA, 70 nt, synthetic construct
  source 1..70: mol_type = other RNA
ggaacatgtaaacctgggggaaagccagagtcgggggaccccattcagcctccaaagaggctttgctgtg

SEQ ID NO: 30927 - RNA, 70 nt, synthetic construct
  source 1..70: mol_type = other RNA
ggaacatgtagacctgggggaaagccagagtcgggggaccccattcagcctccaaagaggctttgctgtg

SEQ ID NO: 30928 - RNA, 70 nt, synthetic construct
  source 1..70: mol_type = other RNA
ggaacatgtacacctgggggaaagccagagtcgggggaccccattcagcctccaaagaggctttgctgtg

SEQ ID NO: 30929 - RNA, 70 nt, synthetic construct
  source 1..70: mol_type = other RNA
ggaacatgtatacctgggggaaagccagagtcgggggaccccattcagcctccaaagaggctttgctgtg

SEQ ID NO: 30930 - RNA, 71 nt, synthetic construct
  source 1..71: mol_type = other RNA
aggaacatgtacacctgggggaaagccagagtcgggggaccccattcagcctccaaagaggctttgctgtg

SEQ ID NO: 30931 - RNA, 71 nt, synthetic construct
  source 1..71: mol_type = other RNA
aggaacatgtatacctgggggaaagccagagtcgggggaccccattcagcctccaaagaggctttgctgtg

SEQ ID NO: 30932 - RNA, 71 nt, synthetic construct
  source 1..71: mol_type = other RNA
aggaacatgtaaacctgggggaaagccagagtcgggggaccccattcagcctccaaagaggctttgctgtg

SEQ ID NO: 30933 - RNA, 71 nt, synthetic construct
  source 1..71: mol_type = other RNA
aggaacatgtagacctgggggaaagccagagtcgggggaccccattcagcctccaaagaggctttgctgtg

SEQ ID NO: 30934 - RNA, 72 nt, synthetic construct
  source 1..72: mol_type = other RNA
caggaacatgtatacctgggggaaagccagagtcgggggaccccattcagcctccaaagaggctttgctgtg

SEQ ID NO: 30935 - RNA, 72 nt, synthetic construct
  source 1..72: mol_type = other RNA
caggaacatgtagacctgggggaaagccagagtcgggggaccccattcagcctccaaagaggctttgctgtg

SEQ ID NO: 30936 - RNA, 72 nt, synthetic construct
  source 1..72: mol_type = other RNA
caggaacatgtacacctgggggaaagccagagtcgggggaccccattcagcctccaaagaggctttgctgtg

SEQ ID NO: 30937 - RNA, 72 nt, synthetic construct
  source 1..72: mol_type = other RNA
caggaacatgtaaacctgggggaaagccagagtcgggggaccccattcagcctccaaagaggctttgctgtg

SEQ ID NO: 30938 - RNA, 73 nt, synthetic construct
  source 1..73: mol_type = other RNA
ccaggaacatgtaaacctgggggaaagccagagtcgggggaccccattcagcctccaaagaggctttgctgtg

SEQ ID NO: 30939 - RNA, 73 nt, synthetic construct
  source 1..73: mol_type = other RNA
ccaggaacatgtagacctgggggaaagccagagtcgggggaccccattcagcctccaaagaggctttgctgtg

SEQ ID NO: 30940 - RNA, 73 nt, synthetic construct
  source 1..73: mol_type = other RNA
ccaggaacatgtatacctgggggaaagccagagtcgggggaccccattcagcctccaaagaggctttgctgtg

SEQ ID NO: 30941 - RNA, 73 nt, synthetic construct
  source 1..73: mol_type = other RNA
ccaggaacatgtacacctgggggaaagccagagtcgggggaccccattcagcctccaaagaggctttgctgtg

SEQ ID NO: 30942 - RNA, 74 nt, synthetic construct
  source 1..74: mol_type = other RNA
accaggaacatgtacacctgggggaaagccagagtcgggggaccccattcagcctccaaagaggctttgctgtg

SEQ ID NO: 30943 - RNA, 74 nt, synthetic construct
  source 1..74: mol_type = other RNA
accaggaacatgtatacctgggggaaagccagagtcgggggaccccattcagcctccaaagaggctttgctgtg

SEQ ID NO: 30944 - RNA, 74 nt, synthetic construct
  source 1..74: mol_type = other RNA
accaggaacatgtagacctgggggaaagccagagtcgggggaccccattcagcctccaaagaggctttgctgtg

SEQ ID NO: 30945 - RNA, 74 nt, synthetic construct
  source 1..74: mol_type = other RNA
accaggaacatgtaaacctgggggaaagccagagtcgggggaccccattcagcctccaaagaggctttgctgtg

SEQ ID NO: 30946 - RNA, 75 nt, synthetic construct
  source 1..75: mol_type = other RNA
caccaggaacatgtaaacctgggggaaagccagagtcgggggaccccattcagcctccaaagaggctttgctgtg

SEQ ID NO: 30947 - RNA, 75 nt, synthetic construct
  source 1..75: mol_type = other RNA
caccaggaacatgtacacctgggggaaagccagagtcgggggaccccattcagcctccaaagaggctttgctgtg

SEQ ID NO: 30948 - RNA, 75 nt, synthetic construct
  source 1..75: mol_type = other RNA
caccaggaacatgtagacctgggggaaagccagagtcgggggaccccattcagcctccaaagaggctttgctgtg

SEQ ID NO: 30949 - RNA, 75 nt, synthetic construct
  source 1..75: mol_type = other RNA
caccaggaacatgtatacctgggggaaagccagagtcgggggaccccattcagcctccaaagaggctttgctgtg

SEQ ID NO: 30950 - RNA, 76 nt, synthetic construct
  source 1..76: mol_type = other RNA
tcaccaggaacatgtaaacctgggggaaagccagagtcgggggaccccattcagcctccaaagaggctttgctgtg

SEQ ID NO: 30951 - RNA, 76 nt, synthetic construct
  source 1..76: mol_type = other RNA
tcaccaggaacatgtagacctgggggaaagccagagtcgggggaccccattcagcctccaaagaggctttgctgtg

SEQ ID NO: 30952 - RNA, 76 nt, synthetic construct
  source 1..76: mol_type = other RNA
tcaccaggaacatgtatacctgggggaaagccagagtcgggggaccccattcagcctccaaagaggctttgctgtg

SEQ ID NO: 30953 - RNA, 76 nt, synthetic construct
  source 1..76: mol_type = other RNA
tcaccaggaacatgtacacctgggggaaagccagagtcgggggaccccattcagcctccaaagaggctttgctgtg

SEQ ID NO: 30954 - RNA, 77 nt, synthetic construct
  source 1..77: mol_type = other RNA
ttcaccaggaacatgtacacctgggggaaagccagagtcgggggaccccattcagcctccaaagaggctttgctgtg

SEQ ID NO: 30955 - RNA, 77 nt, synthetic construct
  source 1..77: mol_type = other RNA
ttcaccaggaacatgtaaacctgggggaaagccagagtcgggggaccccattcagcctccaaagaggctttgctgtg

SEQ ID NO: 30956 - RNA, 77 nt, synthetic construct
  source 1..77: mol_type = other RNA
ttcaccaggaacatgtatacctgggggaaagccagagtcgggggaccccattcagcctccaaagaggctttgctgtg

SEQ ID NO: 30957 - RNA, 77 nt, synthetic construct
  source 1..77: mol_type = other RNA
ttcaccaggaacatgtagacctgggggaaagccagagtcgggggaccccattcagcctccaaagaggctttgctgtg

SEQ ID NO: 30958 - RNA, 78 nt, synthetic construct
  source 1..78: mol_type = other RNA
tttcaccaggaacatgtaaacctgggggaaagccagagtcgggggaccccattcagcctccaaagaggctttgctgtg

SEQ ID NO: 30959 - RNA, 78 nt, synthetic construct
  source 1..78: mol_type = other RNA
tttcaccaggaacatgtatacctgggggaaagccagagtcgggggaccccattcagcctccaaagaggctttgctgtg

SEQ ID NO: 30960 - RNA, 78 nt, synthetic construct
  source 1..78: mol_type = other RNA
tttcaccaggaacatgtacacctgggggaaagccagagtcgggggaccccattcagcctccaaagaggctttgctgtg

SEQ ID NO: 30961 - RNA, 78 nt, synthetic construct
  source 1..78: mol_type = other RNA
tttcaccaggaacatgtagacctgggggaaagccagagtcgggggaccccattcagcctccaaagaggctttgctgtg

SEQ ID NO: 30962 - RNA, 79 nt, synthetic construct
  source 1..79: mol_type = other RNA
atttcaccaggaacatgtaaacctgggggaaagccagagtcgggggaccccattcagcctccaaagaggctttgctgtg

SEQ ID NO: 30963 - RNA, 79 nt, synthetic construct
  source 1..79: mol_type = other RNA
atttcaccaggaacatgtagacctgggggaaagccagagtcgggggaccccattcagcctccaaagaggctttgctgtg

SEQ ID NO: 30964 - RNA, 79 nt, synthetic construct
  source 1..79: mol_type = other RNA
atttcaccaggaacatgtacacctgggggaaagccagagtcgggggaccccattcagcctccaaagaggctttgctgtg

SEQ ID NO: 30965 - RNA, 79 nt, synthetic construct
  source 1..79: mol_type = other RNA
atttcaccaggaacatgtatacctgggggaaagccagagtcgggggaccccattcagcctccaaagaggctttgctgtg

SEQ ID NO: 30966 - RNA, 80 nt, synthetic construct
  source 1..80: mol_type = other RNA
catttcaccaggaacatgtagacctgggggaaagccagagtcgggggaccccattcagcctccaaagaggctttgctgtg

SEQ ID NO: 30967 - RNA, 80 nt, synthetic construct
  source 1..80: mol_type = other RNA
catttcaccaggaacatgtacacctgggggaaagccagagtcgggggaccccattcagcctccaaagaggctttgctgtg

SEQ ID NO: 30968 - RNA, 80 nt, synthetic construct
  source 1..80: mol_type = other RNA
catttcaccaggaacatgtatacctgggggaaagccagagtcgggggaccccattcagcctccaaagaggctttgctgtg

SEQ ID NO: 30969 - RNA, 80 nt, synthetic construct
  source 1..80: mol_type = other RNA
catttcaccaggaacatgtaaacctgggggaaagccagagtcgggggaccccattcagcctccaaagaggctttgctgtg

SEQ ID NO: 30970 - RNA, 81 nt, synthetic construct
  source 1..81: mol_type = other RNA
ccatttcaccaggaacatgtatacctgggggaaagccagagtcgggggaccccattcagcctccaaagaggctttgctgtg

SEQ ID NO: 30971 - RNA, 81 nt, synthetic construct
  source 1..81: mol_type = other RNA
ccatttcaccaggaacatgtagacctgggggaaagccagagtcgggggaccccattcagcctccaaagaggctttgctgtg

SEQ ID NO: 30972 - RNA, 81 nt, synthetic construct
  source 1..81: mol_type = other RNA
ccatttcaccaggaacatgtaaacctgggggaaagccagagtcgggggaccccattcagcctccaaagaggctttgctgtg

SEQ ID NO: 30973 - RNA, 81 nt, synthetic construct
  source 1..81: mol_type = other RNA
ccatttcaccaggaacatgtacacctgggggaaagccagagtcgggggaccccattcagcctccaaagaggctttgctgtg

SEQ ID NO: 30974 - RNA, 82 nt, synthetic construct
  source 1..82: mol_type = other RNA
gccatttcaccaggaacatgtatacctgggggaaagccagagtcgggggaccccattcagcctccaaagaggctttgctgtg

SEQ ID NO: 30975 - RNA, 82 nt, synthetic construct
  source 1..82: mol_type = other RNA
gccatttcaccaggaacatgtaaacctgggggaaagccagagtcgggggaccccattcagcctccaaagaggctttgctgtg

SEQ ID NO: 30976 - RNA, 82 nt, synthetic construct
  source 1..82: mol_type = other RNA
gccatttcaccaggaacatgtacacctgggggaaagccagagtcgggggaccccattcagcctccaaagaggctttgctgtg

SEQ ID NO: 30977 - RNA, 82 nt, synthetic construct
  source 1..82: mol_type = other RNA
gccatttcaccaggaacatgtagacctgggggaaagccagagtcgggggaccccattcagcctccaaagaggctttgctgtg

SEQ ID NO: 30978 - RNA, 83 nt, synthetic construct
  source 1..83: mol_type = other RNA
tgccatttcaccaggaacatgtatacctgggggaaagccagagtcgggggaccccattcagcctccaaagaggctttgctgtg

SEQ ID NO: 30979 - RNA, 83 nt, synthetic construct
  source 1..83: mol_type = other RNA
tgccatttcaccaggaacatgtaaacctgggggaaagccagagtcgggggaccccattcagcctccaaagaggctttgctgtg

SEQ ID NO: 30980 - RNA, 83 nt, synthetic construct
  source 1..83: mol_type = other RNA
tgccatttcaccaggaacatgtacacctgggggaaagccagagtcgggggaccccattcagcctccaaagaggctttgctgtg

SEQ ID NO: 30981 - RNA, 83 nt, synthetic construct
  source 1..83: mol_type = other RNA
tgccatttcaccaggaacatgtagacctgggggaaagccagagtcgggggaccccattcagcctccaaagaggctttgctgtg

SEQ ID NO: 30982 - RNA, 84 nt, synthetic construct
  source 1..84: mol_type = other RNA
ctgccatttcaccaggaacatgtacacctgggggaaagccagagtcgggggaccccattcagcctccaaagaggctttgctgtg

SEQ ID NO: 30983 - RNA, 84 nt, synthetic construct
  source 1..84: mol_type = other RNA
ctgccatttcaccaggaacatgtaaacctgggggaaagccagagtcgggggaccccattcagcctccaaagaggctttgctgtg

SEQ ID NO: 30984 - RNA, 84 nt, synthetic construct
  source 1..84: mol_type = other RNA
ctgccatttcaccaggaacatgtagacctgggggaaagccagagtcgggggaccccattcagcctccaaagaggctttgctgtg

SEQ ID NO: 30985 - RNA, 84 nt, synthetic construct
  source 1..84: mol_type = other RNA
ctgccatttcaccaggaacatgtatacctgggggaaagccagagtcgggggaccccattcagcctccaaagaggctttgctgtg

SEQ ID NO: 30986 - RNA, 85 nt, synthetic construct
  source 1..85: mol_type = other RNA
cctgccatttcaccaggaacatgtatacctgggggaaagccagagtcgggggaccccattcagcctccaaagaggctttgctgtg

SEQ ID NO: 30987 - RNA, 85 nt, synthetic construct
  source 1..85: mol_type = other RNA
cctgccatttcaccaggaacatgtagacctgggggaaagccagagtcgggggaccccattcagcctccaaagaggctttgctgtg

SEQ ID NO: 30988 - RNA, 85 nt, synthetic construct
  source 1..85: mol_type = other RNA
cctgccatttcaccaggaacatgtacacctgggggaaagccagagtcgggggaccccattcagcctccaaagaggctttgctgtg

SEQ ID NO: 30989 - RNA, 85 nt, synthetic construct
  source 1..85: mol_type = other RNA
cctgccatttcaccaggaacatgtaaacctgggggaaagccagagtcgggggaccccattcagcctccaaagaggctttgctgtg

SEQ ID NO: 30990 - RNA, 86 nt, synthetic construct
  source 1..86: mol_type = other RNA
tcctgccatttcaccaggaacatgtacacctgggggaaagccagagtcgggggaccccattcagcctccaaagaggctttgctgtg

SEQ ID NO: 30991 - RNA, 86 nt, synthetic construct
  source 1..86: mol_type = other RNA
tcctgccatttcaccaggaacatgtagacctgggggaaagccagagtcgggggaccccattcagcctccaaagaggctttgctgtg

SEQ ID NO: 30992 - RNA, 86 nt, synthetic construct
  source 1..86: mol_type = other RNA
tcctgccatttcaccaggaacatgtatacctgggggaaagccagagtcgggggaccccattcagcctccaaagaggctttgctgtg

SEQ ID NO: 30993 - RNA, 86 nt, synthetic construct
  source 1..86: mol_type = other RNA
tcctgccatttcaccaggaacatgtaaacctgggggaaagccagagtcgggggaccccattcagcctccaaagaggctttgctgtg

SEQ ID NO: 30994 - RNA, 87 nt, synthetic construct
  source 1..87: mol_type = other RNA
gtcctgccatttcaccaggaacatgtaaacctgggggaaagccagagtcgggggaccccattcagcctccaaagaggctttgctgtg

SEQ ID NO: 30995 - RNA, 87 nt, synthetic construct
  source 1..87: mol_type = other RNA
gtcctgccatttcaccaggaacatgtatacctgggggaaagccagagtcgggggaccccattcagcctccaaagaggctttgctgtg

SEQ ID NO: 30996 - RNA, 87 nt, synthetic construct
  source 1..87: mol_type = other RNA
gtcctgccatttcaccaggaacatgtacacctgggggaaagccagagtcgggggaccccattcagcctccaaagaggctttgctgtg

SEQ ID NO: 30997 - RNA, 87 nt, synthetic construct
  source 1..87: mol_type = other RNA
gtcctgccatttcaccaggaacatgtagacctgggggaaagccagagtcgggggaccccattcagcctccaaagaggctttgctgtg

SEQ ID NO: 30998 - RNA, 88 nt, synthetic construct
  source 1..88: mol_type = other RNA
ggtcctgccatttcaccaggaacatgtacacctgggggaaagccagagtcgggggaccccattcagcctccaaagaggctttgctgtg

SEQ ID NO: 30999 - RNA, 88 nt, synthetic construct
  source 1..88: mol_type = other RNA
ggtcctgccatttcaccaggaacatgtatacctgggggaaagccagagtcgggggaccccattcagcctccaaagaggctttgctgtg

SEQ ID NO: 31000 - RNA, 88 nt, synthetic construct
  source 1..88: mol_type = other RNA
ggtcctgccatttcaccaggaacatgtaaacctgggggaaagccagagtcgggggaccccattcagcctccaaagaggctttgctgtg

SEQ ID NO: 31001 - RNA, 88 nt, synthetic construct
  source 1..88: mol_type = other RNA
ggtcctgccatttcaccaggaacatgtagacctgggggaaagccagagtcgggggaccccattcagcctccaaagaggctttgctgtg

SEQ ID NO: 31002 - RNA, 89 nt, synthetic construct
  source 1..89: mol_type = other RNA
aggtcctgccatttcaccaggaacatgtatacctgggggaaagccagagtcgggggaccccattcagcctccaaagaggctttgctgtg

SEQ ID NO: 31003 - RNA, 89 nt, synthetic construct
  source 1..89: mol_type = other RNA
aggtcctgccatttcaccaggaacatgtagacctgggggaaagccagagtcgggggaccccattcagcctccaaagaggctttgctgtg

SEQ ID NO: 31004 - RNA, 89 nt, synthetic construct
  source 1..89: mol_type = other RNA
aggtcctgccatttcaccaggaacatgtaaacctgggggaaagccagagtcgggggaccccattcagcctccaaagaggctttgctgtg

SEQ ID NO: 31005 - RNA, 89 nt, synthetic construct
  source 1..89: mol_type = other RNA
aggtcctgccatttcaccaggaacatgtacacctgggggaaagccagagtcgggggaccccattcagcctccaaagaggctttgctgtg

SEQ ID NO: 31006 - RNA, 90 nt, synthetic construct
  source 1..90: mol_type = other RNA
caggtcctgccatttcaccaggaacatgtatacctgggggaaagccagagtcgggggaccccattcagcctccaaagaggctttgctgtg

SEQ ID NO: 31007 - RNA, 90 nt, synthetic construct
  source 1..90: mol_type = other RNA
caggtcctgccatttcaccaggaacatgtaaacctgggggaaagccagagtcgggggaccccattcagcctccaaagaggctttgctgtg

SEQ ID NO: 31008 - RNA, 90 nt, synthetic construct
  source 1..90: mol_type = other RNA
caggtcctgccatttcaccaggaacatgtacacctgggggaaagccagagtcgggggaccccattcagcctccaaagaggctttgctgtg

SEQ ID NO: 31009 - RNA, 90 nt, synthetic construct
  source 1..90: mol_type = other RNA
caggtcctgccatttcaccaggaacatgtagacctgggggaaagccagagtcgggggaccccattcagcctccaaagaggctttgctgtg

SEQ ID NO: 31010 - RNA, 91 nt, synthetic construct
  source 1..91: mol_type = other RNA
acaggtcctgccatttcaccaggaacatgtagacctgggggaaagccagagtcgggggaccccattcagcctccaaagaggctttgctgtg

SEQ ID NO: 31011 - RNA, 91 nt, synthetic construct
  source 1..91: mol_type = other RNA
acaggtcctgccatttcaccaggaacatgtaaacctgggggaaagccagagtcgggggaccccattcagcctccaaagaggctttgctgtg

SEQ ID NO: 31012 - RNA, 91 nt, synthetic construct
  source 1..91: mol_type = other RNA
acaggtcctgccatttcaccaggaacatgtacacctgggggaaagccagagtcgggggaccccattcagcctccaaagaggctttgctgtg

SEQ ID NO: 31013 - RNA, 91 nt, synthetic construct
  source 1..91: mol_type = other RNA
acaggtcctgccatttcaccaggaacatgtatacctgggggaaagccagagtcgggggaccccattcagcctccaaagaggctttgctgtg

SEQ ID NO: 31014 - RNA, 92 nt, synthetic construct
  source 1..92: mol_type = other RNA
gacaggtcctgccatttcaccaggaacatgtagacctgggggaaagccagagtcgggggaccccattcagcctccaaagaggctttgctgtg

SEQ ID NO: 31015 - RNA, 92 nt, synthetic construct
  source 1..92: mol_type = other RNA
gacaggtcctgccatttcaccaggaacatgtaaacctgggggaaagccagagtcgggggaccccattcagcctccaaagaggctttgctgtg

SEQ ID NO: 31016 - RNA, 92 nt, synthetic construct
  source 1..92: mol_type = other RNA
gacaggtcctgccatttcaccaggaacatgtacacctgggggaaagccagagtcgggggaccccattcagcctccaaagaggctttgctgtg

SEQ ID NO: 31017 - RNA, 92 nt, synthetic construct
  source 1..92: mol_type = other RNA
gacaggtcctgccatttcaccaggaacatgtatacctgggggaaagccagagtcgggggaccccattcagcctccaaagaggctttgctgtg

SEQ ID NO: 31018 - RNA, 93 nt, synthetic construct
  source 1..93: mol_type = other RNA
cgacaggtcctgccatttcaccaggaacatgtatacctgggggaaagccagagtcgggggaccccattcagcctccaaagaggctttgctgtg

SEQ ID NO: 31019 - RNA, 93 nt, synthetic construct
  source 1..93: mol_type = other RNA
cgacaggtcctgccatttcaccaggaacatgtaaacctgggggaaagccagagtcgggggaccccattcagcctccaaagaggctttgctgtg

SEQ ID NO: 31020 - RNA, 93 nt, synthetic construct
  source 1..93: mol_type = other RNA
cgacaggtcctgccatttcaccaggaacatgtagacctgggggaaagccagagtcgggggaccccattcagcctccaaagaggctttgctgtg

SEQ ID NO: 31021 - RNA, 93 nt, synthetic construct
  source 1..93: mol_type = other RNA
cgacaggtcctgccatttcaccaggaacatgtacacctgggggaaagccagagtcgggggaccccattcagcctccaaagaggctttgctgtg

SEQ ID NO: 31022 - RNA, 94 nt, synthetic construct
  source 1..94: mol_type = other RNA
ccgacaggtcctgccatttcaccaggaacatgtagacctgggggaaagccagagtcgggggaccccattcagcctccaaagaggctttgctgtg

SEQ ID NO: 31023 - RNA, 94 nt, synthetic construct
  source 1..94: mol_type = other RNA
ccgacaggtcctgccatttcaccaggaacatgtatacctgggggaaagccagagtcgggggaccccattcagcctccaaagaggctttgctgtg

SEQ ID NO: 31024 - RNA, 94 nt, synthetic construct
  source 1..94: mol_type = other RNA
ccgacaggtcctgccatttcaccaggaacatgtaaacctgggggaaagccagagtcgggggaccccattcagcctccaaagaggctttgctgtg

SEQ ID NO: 31025 - RNA, 94 nt, synthetic construct
  source 1..94: mol_type = other RNA
ccgacaggtcctgccatttcaccaggaacatgtacacctgggggaaagccagagtcgggggaccccattcagcctccaaagaggctttgctgtg

SEQ ID NO: 31026 - RNA, 95 nt, synthetic construct
  source 1..95: mol_type = other RNA
tccgacaggtcctgccatttcaccaggaacatgtaaacctgggggaaagccagagtcgggggaccccattcagcctccaaagaggctttgctgtg

SEQ ID NO: 31027 - RNA, 95 nt, synthetic construct
  source 1..95: mol_type = other RNA
tccgacaggtcctgccatttcaccaggaacatgtacacctgggggaaagccagagtcgggggaccccattcagcctccaaagaggctttgctgtg

SEQ ID NO: 31028 - RNA, 95 nt, synthetic construct
  source 1..95: mol_type = other RNA
tccgacaggtcctgccatttcaccaggaacatgtagacctgggggaaagccagagtcgggggaccccattcagcctccaaagaggctttgctgtg

SEQ ID NO: 31029 - RNA, 95 nt, synthetic construct
  source 1..95: mol_type = other RNA
tccgacaggtcctgccatttcaccaggaacatgtatacctgggggaaagccagagtcgggggaccccattcagcctccaaagaggctttgctgtg

SEQ ID NO: 31030 - RNA, 96 nt, synthetic construct
  source 1..96: mol_type = other RNA
ctccgacaggtcctgccatttcaccaggaacatgtagacctgggggaaagccagagtcgggggaccccattcagcctccaaagaggctttgctgtg

SEQ ID NO: 31031 - RNA, 96 nt, synthetic construct
  source 1..96: mol_type = other RNA
ctccgacaggtcctgccatttcaccaggaacatgtaaacctgggggaaagccagagtcgggggaccccattcagcctccaaagaggctttgctgtg

SEQ ID NO: 31032 - RNA, 96 nt, synthetic construct
  source 1..96: mol_type = other RNA
ctccgacaggtcctgccatttcaccaggaacatgtacacctgggggaaagccagagtcgggggaccccattcagcctccaaagaggctttgctgtg

SEQ ID NO: 31033 - RNA, 96 nt, synthetic construct
  source 1..96: mol_type = other RNA
ctccgacaggtcctgccatttcaccaggaacatgtatacctgggggaaagccagagtcgggggaccccattcagcctccaaagaggctttgctgtg

SEQ ID NO: 31034 - RNA, 97 nt, synthetic construct
  source 1..97: mol_type = other RNA
tctccgacaggtcctgccatttcaccaggaacatgtaaacctgggggaaagccagagtcgggggaccccattcagcctccaaagaggctttgctgtg

SEQ ID NO: 31035 - RNA, 97 nt, synthetic construct
  source 1..97: mol_type = other RNA
tctccgacaggtcctgccatttcaccaggaacatgtagacctgggggaaagccagagtcgggggaccccattcagcctccaaagaggctttgctgtg

SEQ ID NO: 31036 - RNA, 97 nt, synthetic construct
  source 1..97: mol_type = other RNA
tctccgacaggtcctgccatttcaccaggaacatgtatacctgggggaaagccagagtcgggggaccccattcagcctccaaagaggctttgctgtg

SEQ ID NO: 31037 - RNA, 97 nt, synthetic construct
  source 1..97: mol_type = other RNA
tctccgacaggtcctgccatttcaccaggaacatgtacacctgggggaaagccagagtcgggggaccccattcagcctccaaagaggctttgctgtg

SEQ ID NO: 31038 - RNA, 98 nt, synthetic construct
  source 1..98: mol_type = other RNA
ttctccgacaggtcctgccatttcaccaggaacatgtatacctgggggaaagccagagtcgggggaccccattcagcctccaaagaggctttgctgtg

SEQ ID NO: 31039 - RNA, 98 nt, synthetic construct
  source 1..98: mol_type = other RNA
ttctccgacaggtcctgccatttcaccaggaacatgtagacctgggggaaagccagagtcgggggaccccattcagcctccaaagaggctttgctgtg

SEQ ID NO: 31040 - RNA, 98 nt, synthetic construct
  source 1..98: mol_type = other RNA
ttctccgacaggtcctgccatttcaccaggaacatgtaaacctgggggaaagccagagtcgggggaccccattcagcctccaaagaggctttgctgtg

SEQ ID NO: 31041 - RNA, 98 nt, synthetic construct
  source 1..98: mol_type = other RNA
ttctccgacaggtcctgccatttcaccaggaacatgtacacctgggggaaagccagagtcgggggaccccattcagcctccaaagaggctttgctgtg

SEQ ID NO: 31042 - RNA, 99 nt, synthetic construct
  source 1..99: mol_type = other RNA
cttctccgacaggtcctgccatttcaccaggaacatgtagacctgggggaaagccagagtcgggggaccccattcagcctccaaagaggctttgctgtg

SEQ ID NO: 31043 - RNA, 99 nt, synthetic construct
  source 1..99: mol_type = other RNA
cttctccgacaggtcctgccatttcaccaggaacatgtaaacctgggggaaagccagagtcgggggaccccattcagcctccaaagaggctttgctgtg

SEQ ID NO: 31044 - RNA, 99 nt, synthetic construct
  source 1..99: mol_type = other RNA
cttctccgacaggtcctgccatttcaccaggaacatgtacacctgggggaaagccagagtcgggggaccccattcagcctccaaagaggctttgctgtg

SEQ ID NO: 31045 - RNA, 99 nt, synthetic construct
  source 1..99: mol_type = other RNA
cttctccgacaggtcctgccatttcaccaggaacatgtatacctgggggaaagccagagtcgggggaccccattcagcctccaaagaggctttgctgtg

SEQ ID NO: 31046 - RNA, 100 nt, synthetic construct
  source 1..100: mol_type = other RNA
ccttctccgacaggtcctgccatttcaccaggaacatgtagacctgggggaaagccagagtcgggggaccccattcagcctccaaagaggctttgctgtg

SEQ ID NO: 31047 - RNA, 100 nt, synthetic construct
  source 1..100: mol_type = other RNA
ccttctccgacaggtcctgccatttcaccaggaacatgtatacctgggggaaagccagagtcgggggaccccattcagcctccaaagaggctttgctgtg

SEQ ID NO: 31048 - RNA, 100 nt, synthetic construct
  source 1..100: mol_type = other RNA
ccttctccgacaggtcctgccatttcaccaggaacatgtacacctgggggaaagccagagtcgggggaccccattcagcctccaaagaggctttgctgtg

SEQ ID NO: 31049 - RNA, 100 nt, synthetic construct
  source 1..100: mol_type = other RNA
ccttctccgacaggtcctgccatttcaccaggaacatgtaaacctgggggaaagccagagtcgggggaccccattcagcctccaaagaggctttgctgtg

SEQ ID NO: 31050 - RNA, 101 nt, synthetic construct
  source 1..101: mol_type = other RNA
accttctccgacaggtcctgccatttcaccaggaacatgtatacctgggggaaagccagagtcgggggaccccattcagcctccaaagaggctttgctgtg

SEQ ID NO: 31051 - RNA, 101 nt, synthetic construct
  source 1..101: mol_type = other RNA
accttctccgacaggtcctgccatttcaccaggaacatgtagacctgggggaaagccagagtcgggggaccccattcagcctccaaagaggctttgctgtg

SEQ ID NO: 31052 - RNA, 101 nt, synthetic construct
  source 1..101: mol_type = other RNA
accttctccgacaggtcctgccatttcaccaggaacatgtacacctgggggaaagccagagtcgggggaccccattcagcctccaaagaggctttgctgtg

SEQ ID NO: 31053 - RNA, 101 nt, synthetic construct
  source 1..101: mol_type = other RNA
accttctccgacaggtcctgccatttcaccaggaacatgtaaacctgggggaaagccagagtcgggggaccccattcagcctccaaagaggctttgctgtg

SEQ ID NO: 31054 - RNA, 102 nt, synthetic construct
  source 1..102: mol_type = other RNA
caccttctccgacaggtcctgccatttcaccaggaacatgtatacctgggggaaagccagagtcgggggaccccattcagcctccaaagaggctttgctgtg

SEQ ID NO: 31055 - RNA, 102 nt, synthetic construct
  source 1..102: mol_type = other RNA
caccttctccgacaggtcctgccatttcaccaggaacatgtaaacctgggggaaagccagagtcgggggaccccattcagcctccaaagaggctttgctgtg

SEQ ID NO: 31056 - RNA, 102 nt, synthetic construct
  source 1..102: mol_type = other RNA
caccttctccgacaggtcctgccatttcaccaggaacatgtacacctgggggaaagccagagtcgggggaccccattcagcctccaaagaggctttgctgtg

SEQ ID NO: 31057 - RNA, 102 nt, synthetic construct
  source 1..102: mol_type = other RNA
caccttctccgacaggtcctgccatttcaccaggaacatgtagacctgggggaaagccagagtcgggggaccccattcagcctccaaagaggctttgctgtg

SEQ ID NO: 31058 - RNA, 103 nt, synthetic construct
  source 1..103: mol_type = other RNA
ccaccttctccgacaggtcctgccatttcaccaggaacatgtatacctgggggaaagccagagtcgggggaccccattcagcctccaaagaggctttgctgtg

SEQ ID NO: 31059 - RNA, 103 nt, synthetic construct
  source 1..103: mol_type = other RNA
ccaccttctccgacaggtcctgccatttcaccaggaacatgtagacctgggggaaagccagagtcgggggaccccattcagcctccaaagaggctttgctgtg

SEQ ID NO: 31060 - RNA, 103 nt, synthetic construct
  source 1..103: mol_type = other RNA
ccaccttctccgacaggtcctgccatttcaccaggaacatgtaaacctgggggaaagccagagtcgggggaccccattcagcctccaaagaggctttgctgtg

SEQ ID NO: 31061 - RNA, 103 nt, synthetic construct
  source 1..103: mol_type = other RNA
ccaccttctccgacaggtcctgccatttcaccaggaacatgtacacctgggggaaagccagagtcgggggaccccattcagcctccaaagaggctttgctgtg

SEQ ID NO: 31062 - RNA, 16 nt, synthetic construct
  source 1..16: mol_type = other RNA
gcaaagcctctttgga

SEQ ID NO: 31063 - RNA, 17 nt, synthetic construct
  source 1..17: mol_type = other RNA
agcaaagcctctttgga

SEQ ID NO: 31064 - RNA, 18 nt, synthetic construct
  source 1..18: mol_type = other RNA
cagcaaagcctctttgga

SEQ ID NO: 31065 - RNA, 19 nt, synthetic construct
  source 1..19: mol_type = other RNA
acagcaaagcctctttgga

SEQ ID NO: 31066 - RNA, 20 nt, synthetic construct
  source 1..20: mol_type = other RNA
cacagcaaagcctctttgga

SEQ ID NO: 31067 - RNA, 21 nt, synthetic construct
  source 1..21: mol_type = other RNA
acacagcaaagcctctttgga

SEQ ID NO: 31068 - RNA, 22 nt, synthetic construct
  source 1..22: mol_type = other RNA
cacacagcaaagcctctttgga

SEQ ID NO: 31069-31074 - skipped (6 entries)

SEQ ID NO: 31075 - RNA, 10 nt, synthetic construct
  source 1..10: mol_type = other RNA
aaagaggctt

SEQ ID NO: 31076 - RNA, 11 nt, synthetic construct
  source 1..11: mol_type = other RNA
aaagaggcttt

SEQ ID NO: 31077 - RNA, 12 nt, synthetic construct
  source 1..12: mol_type = other RNA
aaagaggctttg

SEQ ID NO: 31078 - RNA, 13 nt, synthetic construct
  source 1..13: mol_type = other RNA
aaagaggctttgc

SEQ ID NO: 31079 - RNA, 14 nt, synthetic construct
  source 1..14: mol_type = other RNA
aaagaggctttgct

SEQ ID NO: 31080 - RNA, 15 nt, synthetic construct
  source 1..15: mol_type = other RNA
aaagaggctttgctg

SEQ ID NO: 31081 - RNA, 16 nt, synthetic construct
  source 1..16: mol_type = other RNA
aaagaggctttgctgt

SEQ ID NO: 31082 - RNA, 17 nt, synthetic construct
  source 1..17: mol_type = other RNA
aaagaggctttgctgtg

SEQ ID NO: 31083 - RNA, 18 nt, synthetic construct
  source 1..18: mol_type = other RNA
aaagaggctttgctgtgt

SEQ ID NO: 31084 - RNA, 19 nt, synthetic construct
  source 1..19: mol_type = other RNA
aaagaggctttgctgtgtg

SEQ ID NO: 31085 - RNA, 42 nt, synthetic construct
  source 1..42: mol_type = other RNA
acctgggggaaagccagagtcgggggaccccattcagcctcc

SEQ ID NO: 31086 - RNA, 43 nt, synthetic construct
  source 1..43: mol_type = other RNA
cacctgggggaaagccagagtcgggggaccccattcagcctcc

SEQ ID NO: 31087 - RNA, 43 nt, synthetic construct
  source 1..43: mol_type = other RNA
gacctgggggaaagccagagtcgggggaccccattcagcctcc

SEQ ID NO: 31088 - RNA, 43 nt, synthetic construct
  source 1..43: mol_type = other RNA
tacctgggggaaagccagagtcgggggaccccattcagcctcc

SEQ ID NO: 31089 - RNA, 43 nt, synthetic construct
  source 1..43: mol_type = other RNA
aacctgggggaaagccagagtcgggggaccccattcagcctcc

SEQ ID NO: 31090 - RNA, 44 nt, synthetic construct
  source 1..44: mol_type = other RNA
atacctgggggaaagccagagtcgggggaccccattcagcctcc

SEQ ID NO: 31091 - RNA, 44 nt, synthetic construct
  source 1..44: mol_type = other RNA
agacctgggggaaagccagagtcgggggaccccattcagcctcc

SEQ ID NO: 31092 - RNA, 44 nt, synthetic construct
  source 1..44: mol_type = other RNA
aaacctgggggaaagccagagtcgggggaccccattcagcctcc

SEQ ID NO: 31093 - RNA, 44 nt, synthetic construct
  source 1..44: mol_type = other RNA
acacctgggggaaagccagagtcgggggaccccattcagcctcc

SEQ ID NO: 31094 - RNA, 45 nt, synthetic construct
  source 1..45: mol_type = other RNA
taaacctgggggaaagccagagtcgggggaccccattcagcctcc

SEQ ID NO: 31095 - RNA, 45 nt, synthetic construct
  source 1..45: mol_type = other RNA
tatacctgggggaaagccagagtcgggggaccccattcagcctcc

SEQ ID NO: 31096 - RNA, 45 nt, synthetic construct
  source 1..45: mol_type = other RNA
tacacctgggggaaagccagagtcgggggaccccattcagcctcc

SEQ ID NO: 31097 - RNA, 45 nt, synthetic construct
  source 1..45: mol_type = other RNA
tagacctgggggaaagccagagtcgggggaccccattcagcctcc

SEQ ID NO: 31098 - RNA, 46 nt, synthetic construct
  source 1..46: mol_type = other RNA
gtacacctgggggaaagccagagtcgggggaccccattcagcctcc

SEQ ID NO: 31099 - RNA, 46 nt, synthetic construct
  source 1..46: mol_type = other RNA
gtagacctgggggaaagccagagtcgggggaccccattcagcctcc

SEQ ID NO: 31100 - RNA, 46 nt, synthetic construct
  source 1..46: mol_type = other RNA
gtatacctgggggaaagccagagtcgggggaccccattcagcctcc

SEQ ID NO: 31101 - RNA, 46 nt, synthetic construct
  source 1..46: mol_type = other RNA
gtaaacctgggggaaagccagagtcgggggaccccattcagcctcc

SEQ ID NO: 31102 - RNA, 47 nt, synthetic construct
  source 1..47: mol_type = other RNA
tgtaaacctgggggaaagccagagtcgggggaccccattcagcctcc

SEQ ID NO: 31103 - RNA, 47 nt, synthetic construct
  source 1..47: mol_type = other RNA
tgtacacctgggggaaagccagagtcgggggaccccattcagcctcc

SEQ ID NO: 31104 - RNA, 47 nt, synthetic construct
  source 1..47: mol_type = other RNA
tgtagacctgggggaaagccagagtcgggggaccccattcagcctcc

SEQ ID NO: 31105 - RNA, 47 nt, synthetic construct
  source 1..47: mol_type = other RNA
tgtatacctgggggaaagccagagtcgggggaccccattcagcctcc

SEQ ID NO: 31106 - RNA, 48 nt, synthetic construct
  source 1..48: mol_type = other RNA
atgtagacctgggggaaagccagagtcgggggaccccattcagcctcc

SEQ ID NO: 31107 - RNA, 48 nt, synthetic construct
  source 1..48: mol_type = other RNA
atgtatacctgggggaaagccagagtcgggggaccccattcagcctcc

SEQ ID NO: 31108 - RNA, 48 nt, synthetic construct
  source 1..48: mol_type = other RNA
atgtacacctgggggaaagccagagtcgggggaccccattcagcctcc

SEQ ID NO: 31109 - RNA, 48 nt, synthetic construct
  source 1..48: mol_type = other RNA
atgtaaacctgggggaaagccagagtcgggggaccccattcagcctcc

SEQ ID NO: 31110 - RNA, 49 nt, synthetic construct
  source 1..49: mol_type = other RNA
catgtagacctgggggaaagccagagtcgggggaccccattcagcctcc

SEQ ID NO: 31111 - RNA, 49 nt, synthetic construct
  source 1..49: mol_type = other RNA
catgtatacctgggggaaagccagagtcgggggaccccattcagcctcc

SEQ ID NO: 31112 - RNA, 49 nt, synthetic construct
  source 1..49: mol_type = other RNA
catgtaaacctgggggaaagccagagtcgggggaccccattcagcctcc

SEQ ID NO: 31113 - RNA, 49 nt, synthetic construct
  source 1..49: mol_type = other RNA
catgtacacctgggggaaagccagagtcgggggaccccattcagcctcc

SEQ ID NO: 31114 - RNA, 50 nt, synthetic construct
  source 1..50: mol_type = other RNA
acatgtacacctgggggaaagccagagtcgggggaccccattcagcctcc

SEQ ID NO: 31115 - RNA, 50 nt, synthetic construct
  source 1..50: mol_type = other RNA
acatgtatacctgggggaaagccagagtcgggggaccccattcagcctcc

SEQ ID NO: 31116 - RNA, 50 nt, synthetic construct
  source 1..50: mol_type = other RNA
acatgtaaacctgggggaaagccagagtcgggggaccccattcagcctcc

SEQ ID NO: 31117 - RNA, 50 nt, synthetic construct
  source 1..50: mol_type = other RNA
acatgtagacctgggggaaagccagagtcgggggaccccattcagcctcc

SEQ ID NO: 31118 - RNA, 51 nt, synthetic construct
  source 1..51: mol_type = other RNA
aacatgtatacctgggggaaagccagagtcgggggaccccattcagcctcc

SEQ ID NO: 31119 - RNA, 51 nt, synthetic construct
  source 1..51: mol_type = other RNA
aacatgtaaacctgggggaaagccagagtcgggggaccccattcagcctcc

SEQ ID NO: 31120 - RNA, 51 nt, synthetic construct
  source 1..51: mol_type = other RNA
aacatgtagacctgggggaaagccagagtcgggggaccccattcagcctcc

SEQ ID NO: 31121 - RNA, 51 nt, synthetic construct
  source 1..51: mol_type = other RNA
aacatgtacacctgggggaaagccagagtcgggggaccccattcagcctcc

SEQ ID NO: 31122 - RNA, 52 nt, synthetic construct
  source 1..52: mol_type = other RNA
gaacatgtagacctgggggaaagccagagtcgggggaccccattcagcctcc

SEQ ID NO: 31123 - RNA, 52 nt, synthetic construct
  source 1..52: mol_type = other RNA
gaacatgtacacctgggggaaagccagagtcgggggaccccattcagcctcc

SEQ ID NO: 31124 - RNA, 52 nt, synthetic construct
  source 1..52: mol_type = other RNA
gaacatgtaaacctgggggaaagccagagtcgggggaccccattcagcctcc

SEQ ID NO: 31125 - RNA, 52 nt, synthetic construct
  source 1..52: mol_type = other RNA
gaacatgtatacctgggggaaagccagagtcgggggaccccattcagcctcc

SEQ ID NO: 31126 - RNA, 53 nt, synthetic construct
  source 1..53: mol_type = other RNA
ggaacatgtatacctgggggaaagccagagtcgggggaccccattcagcctcc

SEQ ID NO: 31127 - RNA, 53 nt, synthetic construct
  source 1..53: mol_type = other RNA
ggaacatgtaaacctgggggaaagccagagtcgggggaccccattcagcctcc

SEQ ID NO: 31128 - RNA, 53 nt, synthetic construct
  source 1..53: mol_type = other RNA
ggaacatgtacacctgggggaaagccagagtcgggggaccccattcagcctcc

SEQ ID NO: 31129 - RNA, 53 nt, synthetic construct
  source 1..53: mol_type = other RNA
ggaacatgtagacctgggggaaagccagagtcgggggaccccattcagcctcc

SEQ ID NO: 31130 - RNA, 54 nt, synthetic construct
  source 1..54: mol_type = other RNA
aggaacatgtacacctgggggaaagccagagtcgggggaccccattcagcctcc

SEQ ID NO: 31131 - RNA, 54 nt, synthetic construct
  source 1..54: mol_type = other RNA
aggaacatgtagacctgggggaaagccagagtcgggggaccccattcagcctcc

SEQ ID NO: 31132 - RNA, 54 nt, synthetic construct
  source 1..54: mol_type = other RNA
aggaacatgtaaacctgggggaaagccagagtcgggggaccccattcagcctcc

SEQ ID NO: 31133 - RNA, 54 nt, synthetic construct
  source 1..54: mol_type = other RNA
aggaacatgtatacctgggggaaagccagagtcgggggaccccattcagcctcc

SEQ ID NO: 31134 - RNA, 55 nt, synthetic construct
  source 1..55: mol_type = other RNA
caggaacatgtacacctgggggaaagccagagtcgggggaccccattcagcctcc

SEQ ID NO: 31135 - RNA, 55 nt, synthetic construct
  source 1..55: mol_type = other RNA
caggaacatgtagacctgggggaaagccagagtcgggggaccccattcagcctcc

SEQ ID NO: 31136 - RNA, 55 nt, synthetic construct
  source 1..55: mol_type = other RNA
caggaacatgtaaacctgggggaaagccagagtcgggggaccccattcagcctcc

SEQ ID NO: 31137 - RNA, 55 nt, synthetic construct
  source 1..55: mol_type = other RNA
caggaacatgtatacctgggggaaagccagagtcgggggaccccattcagcctcc

SEQ ID NO: 31138 - RNA, 56 nt, synthetic construct
  source 1..56: mol_type = other RNA
ccaggaacatgtacacctgggggaaagccagagtcgggggaccccattcagcctcc

SEQ ID NO: 31139 - RNA, 56 nt, synthetic construct
  source 1..56: mol_type = other RNA
ccaggaacatgtatacctgggggaaagccagagtcgggggaccccattcagcctcc

SEQ ID NO: 31140 - RNA, 56 nt, synthetic construct
  source 1..56: mol_type = other RNA
ccaggaacatgtaaacctgggggaaagccagagtcgggggaccccattcagcctcc

SEQ ID NO: 31141 - RNA, 56 nt, synthetic construct
  source 1..56: mol_type = other RNA
ccaggaacatgtagacctgggggaaagccagagtcgggggaccccattcagcctcc

SEQ ID NO: 31142 - RNA, 57 nt, synthetic construct
  source 1..57: mol_type = other RNA
accaggaacatgtagacctgggggaaagccagagtcgggggaccccattcagcctcc

SEQ ID NO: 31143 - RNA, 57 nt, synthetic construct
  source 1..57: mol_type = other RNA
accaggaacatgtatacctgggggaaagccagagtcgggggaccccattcagcctcc

SEQ ID NO: 31144 - RNA, 57 nt, synthetic construct
  source 1..57: mol_type = other RNA
accaggaacatgtaaacctgggggaaagccagagtcgggggaccccattcagcctcc

SEQ ID NO: 31145 - RNA, 57 nt, synthetic construct
  source 1..57: mol_type = other RNA
accaggaacatgtacacctgggggaaagccagagtcgggggaccccattcagcctcc

SEQ ID NO: 31146 - RNA, 58 nt, synthetic construct
  source 1..58: mol_type = other RNA
caccaggaacatgtagacctgggggaaagccagagtcgggggaccccattcagcctcc

SEQ ID NO: 31147 - RNA, 58 nt, synthetic construct
  source 1..58: mol_type = other RNA
caccaggaacatgtacacctgggggaaagccagagtcgggggaccccattcagcctcc

SEQ ID NO: 31148 - RNA, 58 nt, synthetic construct
  source 1..58: mol_type = other RNA
caccaggaacatgtatacctgggggaaagccagagtcgggggaccccattcagcctcc

SEQ ID NO: 31149 - RNA, 58 nt, synthetic construct
  source 1..58: mol_type = other RNA
caccaggaacatgtaaacctgggggaaagccagagtcgggggaccccattcagcctcc

SEQ ID NO: 31150 - RNA, 59 nt, synthetic construct
  source 1..59: mol_type = other RNA
tcaccaggaacatgtatacctgggggaaagccagagtcgggggaccccattcagcctcc

SEQ ID NO: 31151 - RNA, 59 nt, synthetic construct
  source 1..59: mol_type = other RNA
tcaccaggaacatgtagacctgggggaaagccagagtcgggggaccccattcagcctcc

SEQ ID NO: 31152 - RNA, 59 nt, synthetic construct
  source 1..59: mol_type = other RNA
tcaccaggaacatgtacacctgggggaaagccagagtcgggggaccccattcagcctcc

SEQ ID NO: 31153 - RNA, 59 nt, synthetic construct
  source 1..59: mol_type = other RNA
tcaccaggaacatgtaaacctgggggaaagccagagtcgggggaccccattcagcctcc

SEQ ID NO: 31154 - RNA, 60 nt, synthetic construct
  source 1..60: mol_type = other RNA
ttcaccaggaacatgtaaacctgggggaaagccagagtcgggggaccccattcagcctcc

SEQ ID NO: 31155 - RNA, 60 nt, synthetic construct
  source 1..60: mol_type = other RNA
ttcaccaggaacatgtatacctgggggaaagccagagtcgggggaccccattcagcctcc

SEQ ID NO: 31156 - RNA, 60 nt, synthetic construct
  source 1..60: mol_type = other RNA
ttcaccaggaacatgtacacctgggggaaagccagagtcgggggaccccattcagcctcc

SEQ ID NO: 31157 - RNA, 60 nt, synthetic construct
  source 1..60: mol_type = other RNA
ttcaccaggaacatgtagacctgggggaaagccagagtcgggggaccccattcagcctcc

SEQ ID NO: 31158 - RNA, 61 nt, synthetic construct
  source 1..61: mol_type = other RNA
tttcaccaggaacatgtacacctgggggaaagccagagtcgggggaccccattcagcctcc

SEQ ID NO: 31159 - RNA, 61 nt, synthetic construct
  source 1..61: mol_type = other RNA
tttcaccaggaacatgtagacctgggggaaagccagagtcgggggaccccattcagcctcc

SEQ ID NO: 31160 - RNA, 61 nt, synthetic construct
  source 1..61: mol_type = other RNA
tttcaccaggaacatgtatacctgggggaaagccagagtcgggggaccccattcagcctcc

SEQ ID NO: 31161 - RNA, 61 nt, synthetic construct
  source 1..61: mol_type = other RNA
tttcaccaggaacatgtaaacctgggggaaagccagagtcgggggaccccattcagcctcc

SEQ ID NO: 31162 - RNA, 62 nt, synthetic construct
  source 1..62: mol_type = other RNA
atttcaccaggaacatgtagacctgggggaaagccagagtcgggggaccccattcagcctcc

SEQ ID NO: 31163 - RNA, 62 nt, synthetic construct
  source 1..62: mol_type = other RNA
atttcaccaggaacatgtaaacctgggggaaagccagagtcgggggaccccattcagcctcc

SEQ ID NO: 31164 - RNA, 62 nt, synthetic construct
  source 1..62: mol_type = other RNA
atttcaccaggaacatgtacacctgggggaaagccagagtcgggggaccccattcagcctcc

SEQ ID NO: 31165 - RNA, 62 nt, synthetic construct
  source 1..62: mol_type = other RNA
atttcaccaggaacatgtatacctgggggaaagccagagtcgggggaccccattcagcctcc

SEQ ID NO: 31166 - RNA, 63 nt, synthetic construct
  source 1..63: mol_type = other RNA
catttcaccaggaacatgtagacctgggggaaagccagagtcgggggaccccattcagcctcc

SEQ ID NO: 31167 - RNA, 63 nt, synthetic construct
  source 1..63: mol_type = other RNA
catttcaccaggaacatgtaaacctgggggaaagccagagtcgggggaccccattcagcctcc

SEQ ID NO: 31168 - RNA, 63 nt, synthetic construct
  source 1..63: mol_type = other RNA
catttcaccaggaacatgtacacctgggggaaagccagagtcgggggaccccattcagcctcc

SEQ ID NO: 31169 - RNA, 63 nt, synthetic construct
  source 1..63: mol_type = other RNA
catttcaccaggaacatgtatacctgggggaaagccagagtcgggggaccccattcagcctcc

SEQ ID NO: 31170 - RNA, 64 nt, synthetic construct
  source 1..64: mol_type = other RNA
ccatttcaccaggaacatgtatacctgggggaaagccagagtcgggggaccccattcagcctcc

SEQ ID NO: 31171 - RNA, 64 nt, synthetic construct
  source 1..64: mol_type = other RNA
ccatttcaccaggaacatgtagacctgggggaaagccagagtcgggggaccccattcagcctcc

SEQ ID NO: 31172 - RNA, 64 nt, synthetic construct
  source 1..64: mol_type = other RNA
ccatttcaccaggaacatgtacacctgggggaaagccagagtcgggggaccccattcagcctcc

SEQ ID NO: 31173 - RNA, 64 nt, synthetic construct
  source 1..64: mol_type = other RNA
ccatttcaccaggaacatgtaaacctgggggaaagccagagtcgggggaccccattcagcctcc

SEQ ID NO: 31174 - RNA, 65 nt, synthetic construct
  source 1..65: mol_type = other RNA
gccatttcaccaggaacatgtatacctgggggaaagccagagtcgggggaccccattcagcctcc

SEQ ID NO: 31175 - RNA, 65 nt, synthetic construct
  source 1..65: mol_type = other RNA
gccatttcaccaggaacatgtagacctgggggaaagccagagtcgggggaccccattcagcctcc

SEQ ID NO: 31176 - RNA, 65 nt, synthetic construct
  source 1..65: mol_type = other RNA
gccatttcaccaggaacatgtacacctgggggaaagccagagtcgggggaccccattcagcctcc

SEQ ID NO: 31177 - RNA, 65 nt, synthetic construct
  source 1..65: mol_type = other RNA
gccatttcaccaggaacatgtaaacctgggggaaagccagagtcgggggaccccattcagcctcc

SEQ ID NO: 31178 - RNA, 66 nt, synthetic construct
  source 1..66: mol_type = other RNA
tgccatttcaccaggaacatgtaaacctgggggaaagccagagtcgggggaccccattcagcctcc

SEQ ID NO: 31179 - RNA, 66 nt, synthetic construct
  source 1..66: mol_type = other RNA
tgccatttcaccaggaacatgtagacctgggggaaagccagagtcgggggaccccattcagcctcc

SEQ ID NO: 31180 - RNA, 66 nt, synthetic construct
  source 1..66: mol_type = other RNA
tgccatttcaccaggaacatgtatacctgggggaaagccagagtcgggggaccccattcagcctcc

SEQ ID NO: 31181 - RNA, 66 nt, synthetic construct
  source 1..66: mol_type = other RNA
tgccatttcaccaggaacatgtacacctgggggaaagccagagtcgggggaccccattcagcctcc

SEQ ID NO: 31182 - RNA, 67 nt, synthetic construct
  source 1..67: mol_type = other RNA
ctgccatttcaccaggaacatgtatacctgggggaaagccagagtcgggggaccccattcagcctcc

SEQ ID NO: 31183 - RNA, 67 nt, synthetic construct
  source 1..67: mol_type = other RNA
ctgccatttcaccaggaacatgtaaacctgggggaaagccagagtcgggggaccccattcagcctcc

SEQ ID NO: 31184 - RNA, 67 nt, synthetic construct
  source 1..67: mol_type = other RNA
ctgccatttcaccaggaacatgtacacctgggggaaagccagagtcgggggaccccattcagcctcc

SEQ ID NO: 31185 - RNA, 67 nt, synthetic construct
  source 1..67: mol_type = other RNA
ctgccatttcaccaggaacatgtagacctgggggaaagccagagtcgggggaccccattcagcctcc

SEQ ID NO: 31186 - RNA, 68 nt, synthetic construct
  source 1..68: mol_type = other RNA
cctgccatttcaccaggaacatgtaaacctgggggaaagccagagtcgggggaccccattcagcctcc

SEQ ID NO: 31187 - RNA, 68 nt, synthetic construct
  source 1..68: mol_type = other RNA
cctgccatttcaccaggaacatgtatacctgggggaaagccagagtcgggggaccccattcagcctcc

SEQ ID NO: 31188 - RNA, 68 nt, synthetic construct
  source 1..68: mol_type = other RNA
cctgccatttcaccaggaacatgtagacctgggggaaagccagagtcgggggaccccattcagcctcc

SEQ ID NO: 31189 - RNA, 68 nt, synthetic construct
  source 1..68: mol_type = other RNA
cctgccatttcaccaggaacatgtacacctgggggaaagccagagtcgggggaccccattcagcctcc

SEQ ID NO: 31190 - RNA, 69 nt, synthetic construct
  source 1..69: mol_type = other RNA
tcctgccatttcaccaggaacatgtaaacctgggggaaagccagagtcgggggaccccattcagcctcc

SEQ ID NO: 31191 - RNA, 69 nt, synthetic construct
  source 1..69: mol_type = other RNA
tcctgccatttcaccaggaacatgtacacctgggggaaagccagagtcgggggaccccattcagcctcc

SEQ ID NO: 31192 - RNA, 69 nt, synthetic construct
  source 1..69: mol_type = other RNA
tcctgccatttcaccaggaacatgtatacctgggggaaagccagagtcgggggaccccattcagcctcc

SEQ ID NO: 31193 - RNA, 69 nt, synthetic construct
  source 1..69: mol_type = other RNA
tcctgccatttcaccaggaacatgtagacctgggggaaagccagagtcgggggaccccattcagcctcc

SEQ ID NO: 31194 - RNA, 70 nt, synthetic construct
  source 1..70: mol_type = other RNA
gtcctgccatttcaccaggaacatgtatacctgggggaaagccagagtcgggggaccccattcagcctcc

SEQ ID NO: 31195 - RNA, 70 nt, synthetic construct
  source 1..70: mol_type = other RNA
gtcctgccatttcaccaggaacatgtagacctgggggaaagccagagtcgggggaccccattcagcctcc

SEQ ID NO: 31196 - RNA, 70 nt, synthetic construct
  source 1..70: mol_type = other RNA
gtcctgccatttcaccaggaacatgtacacctgggggaaagccagagtcgggggaccccattcagcctcc

SEQ ID NO: 31197 - RNA, 70 nt, synthetic construct
  source 1..70: mol_type = other RNA
gtcctgccatttcaccaggaacatgtaaacctgggggaaagccagagtcgggggaccccattcagcctcc

SEQ ID NO: 31198 - RNA, 71 nt, synthetic construct
  source 1..71: mol_type = other RNA
ggtcctgccatttcaccaggaacatgtaaacctgggggaaagccagagtcgggggaccccattcagcctcc

SEQ ID NO: 31199 - RNA, 71 nt, synthetic construct
  source 1..71: mol_type = other RNA
ggtcctgccatttcaccaggaacatgtacacctgggggaaagccagagtcgggggaccccattcagcctcc

SEQ ID NO: 31200 - RNA, 71 nt, synthetic construct
  source 1..71: mol_type = other RNA
ggtcctgccatttcaccaggaacatgtatacctgggggaaagccagagtcgggggaccccattcagcctcc

SEQ ID NO: 31201 - RNA, 71 nt, synthetic construct
  source 1..71: mol_type = other RNA
ggtcctgccatttcaccaggaacatgtagacctgggggaaagccagagtcgggggaccccattcagcctcc

SEQ ID NO: 31202 - RNA, 72 nt, synthetic construct
  source 1..72: mol_type = other RNA
aggtcctgccatttcaccaggaacatgtatacctgggggaaagccagagtcgggggaccccattcagcctcc

SEQ ID NO: 31203 - RNA, 72 nt, synthetic construct
  source 1..72: mol_type = other RNA
aggtcctgccatttcaccaggaacatgtagacctgggggaaagccagagtcgggggaccccattcagcctcc

SEQ ID NO: 31204 - RNA, 72 nt, synthetic construct
  source 1..72: mol_type = other RNA
aggtcctgccatttcaccaggaacatgtacacctgggggaaagccagagtcgggggaccccattcagcctcc

SEQ ID NO: 31205 - RNA, 72 nt, synthetic construct
  source 1..72: mol_type = other RNA
aggtcctgccatttcaccaggaacatgtaaacctgggggaaagccagagtcgggggaccccattcagcctcc

SEQ ID NO: 31206 - RNA, 73 nt, synthetic construct
  source 1..73: mol_type = other RNA
caggtcctgccatttcaccaggaacatgtagacctgggggaaagccagagtcgggggaccccattcagcctcc

SEQ ID NO: 31207 - RNA, 73 nt, synthetic construct
  source 1..73: mol_type = other RNA
caggtcctgccatttcaccaggaacatgtacacctgggggaaagccagagtcgggggaccccattcagcctcc

SEQ ID NO: 31208 - RNA, 73 nt, synthetic construct
  source 1..73: mol_type = other RNA
caggtcctgccatttcaccaggaacatgtaaacctgggggaaagccagagtcgggggaccccattcagcctcc

SEQ ID NO: 31209 - RNA, 73 nt, synthetic construct
  source 1..73: mol_type = other RNA
caggtcctgccatttcaccaggaacatgtatacctgggggaaagccagagtcgggggaccccattcagcctcc

SEQ ID NO: 31210 - RNA, 74 nt, synthetic construct
  source 1..74: mol_type = other RNA
acaggtcctgccatttcaccaggaacatgtatacctgggggaaagccagagtcgggggaccccattcagcctcc

SEQ ID NO: 31211 - RNA, 74 nt, synthetic construct
  source 1..74: mol_type = other RNA
acaggtcctgccatttcaccaggaacatgtacacctgggggaaagccagagtcgggggaccccattcagcctcc

SEQ ID NO: 31212 - RNA, 74 nt, synthetic construct
  source 1..74: mol_type = other RNA
acaggtcctgccatttcaccaggaacatgtaaacctgggggaaagccagagtcgggggaccccattcagcctcc

SEQ ID NO: 31213 - RNA, 74 nt, synthetic construct
  source 1..74: mol_type = other RNA
acaggtcctgccatttcaccaggaacatgtagacctgggggaaagccagagtcgggggaccccattcagcctcc

SEQ ID NO: 31214 - RNA, 75 nt, synthetic construct
  source 1..75: mol_type = other RNA
gacaggtcctgccatttcaccaggaacatgtatacctgggggaaagccagagtcgggggaccccattcagcctcc

SEQ ID NO: 31215 - RNA, 75 nt, synthetic construct
  source 1..75: mol_type = other RNA
gacaggtcctgccatttcaccaggaacatgtagacctgggggaaagccagagtcgggggaccccattcagcctcc

SEQ ID NO: 31216 - RNA, 75 nt, synthetic construct
  source 1..75: mol_type = other RNA
gacaggtcctgccatttcaccaggaacatgtacacctgggggaaagccagagtcgggggaccccattcagcctcc

SEQ ID NO: 31217 - RNA, 75 nt, synthetic construct
  source 1..75: mol_type = other RNA
gacaggtcctgccatttcaccaggaacatgtaaacctgggggaaagccagagtcgggggaccccattcagcctcc

SEQ ID NO: 31218 - RNA, 76 nt, synthetic construct
  source 1..76: mol_type = other RNA
cgacaggtcctgccatttcaccaggaacatgtaaacctgggggaaagccagagtcgggggaccccattcagcctcc

SEQ ID NO: 31219 - RNA, 76 nt, synthetic construct
  source 1..76: mol_type = other RNA
cgacaggtcctgccatttcaccaggaacatgtagacctgggggaaagccagagtcgggggaccccattcagcctcc

SEQ ID NO: 31220 - RNA, 76 nt, synthetic construct
  source 1..76: mol_type = other RNA
cgacaggtcctgccatttcaccaggaacatgtatacctgggggaaagccagagtcgggggaccccattcagcctcc

SEQ ID NO: 31221 - RNA, 76 nt, synthetic construct
  source 1..76: mol_type = other RNA
cgacaggtcctgccatttcaccaggaacatgtacacctgggggaaagccagagtcgggggaccccattcagcctcc

SEQ ID NO: 31222 - RNA, 77 nt, synthetic construct
  source 1..77: mol_type = other RNA
ccgacaggtcctgccatttcaccaggaacatgtatacctgggggaaagccagagtcgggggaccccattcagcctcc

SEQ ID NO: 31223 - RNA, 77 nt, synthetic construct
  source 1..77: mol_type = other RNA
ccgacaggtcctgccatttcaccaggaacatgtagacctgggggaaagccagagtcgggggaccccattcagcctcc

SEQ ID NO: 31224 - RNA, 77 nt, synthetic construct
  source 1..77: mol_type = other RNA
ccgacaggtcctgccatttcaccaggaacatgtacacctgggggaaagccagagtcgggggaccccattcagcctcc

SEQ ID NO: 31225 - RNA, 77 nt, synthetic construct
  source 1..77: mol_type = other RNA
ccgacaggtcctgccatttcaccaggaacatgtaaacctgggggaaagccagagtcgggggaccccattcagcctcc

SEQ ID NO: 31226 - RNA, 78 nt, synthetic construct
  source 1..78: mol_type = other RNA
tccgacaggtcctgccatttcaccaggaacatgtacacctgggggaaagccagagtcgggggaccccattcagcctcc

SEQ ID NO: 31227 - RNA, 78 nt, synthetic construct
  source 1..78: mol_type = other RNA
tccgacaggtcctgccatttcaccaggaacatgtagacctgggggaaagccagagtcgggggaccccattcagcctcc

SEQ ID NO: 31228 - RNA, 78 nt, synthetic construct
  source 1..78: mol_type = other RNA
tccgacaggtcctgccatttcaccaggaacatgtatacctgggggaaagccagagtcgggggaccccattcagcctcc

SEQ ID NO: 31229 - RNA, 78 nt, synthetic construct
  source 1..78: mol_type = other RNA
tccgacaggtcctgccatttcaccaggaacatgtaaacctgggggaaagccagagtcgggggaccccattcagcctcc

SEQ ID NO: 31230 - RNA, 79 nt, synthetic construct
  source 1..79: mol_type = other RNA
ctccgacaggtcctgccatttcaccaggaacatgtaaacctgggggaaagccagagtcgggggaccccattcagcctcc

SEQ ID NO: 31231 - RNA, 79 nt, synthetic construct
  source 1..79: mol_type = other RNA
ctccgacaggtcctgccatttcaccaggaacatgtagacctgggggaaagccagagtcgggggaccccattcagcctcc

SEQ ID NO: 31232 - RNA, 79 nt, synthetic construct
  source 1..79: mol_type = other RNA
ctccgacaggtcctgccatttcaccaggaacatgtatacctgggggaaagccagagtcgggggaccccattcagcctcc

SEQ ID NO: 31233 - RNA, 79 nt, synthetic construct
  source 1..79: mol_type = other RNA
ctccgacaggtcctgccatttcaccaggaacatgtacacctgggggaaagccagagtcgggggaccccattcagcctcc

SEQ ID NO: 31234 - RNA, 80 nt, synthetic construct
  source 1..80: mol_type = other RNA
tctccgacaggtcctgccatttcaccaggaacatgtatacctgggggaaagccagagtcgggggaccccattcagcctcc

SEQ ID NO: 31235 - RNA, 80 nt, synthetic construct
  source 1..80: mol_type = other RNA
tctccgacaggtcctgccatttcaccaggaacatgtacacctgggggaaagccagagtcgggggaccccattcagcctcc

SEQ ID NO: 31236 - RNA, 80 nt, synthetic construct
  source 1..80: mol_type = other RNA
tctccgacaggtcctgccatttcaccaggaacatgtaaacctgggggaaagccagagtcgggggaccccattcagcctcc

SEQ ID NO: 31237 - RNA, 80 nt, synthetic construct
  source 1..80: mol_type = other RNA
tctccgacaggtcctgccatttcaccaggaacatgtagacctgggggaaagccagagtcgggggaccccattcagcctcc

SEQ ID NO: 31238 - RNA, 81 nt, synthetic construct
  source 1..81: mol_type = other RNA
ttctccgacaggtcctgccatttcaccaggaacatgtagacctgggggaaagccagagtcgggggaccccattcagcctcc

SEQ ID NO: 31239 - RNA, 81 nt, synthetic construct
  source 1..81: mol_type = other RNA
ttctccgacaggtcctgccatttcaccaggaacatgtacacctgggggaaagccagagtcgggggaccccattcagcctcc

SEQ ID NO: 31240 - RNA, 81 nt, synthetic construct
  source 1..81: mol_type = other RNA
ttctccgacaggtcctgccatttcaccaggaacatgtaaacctgggggaaagccagagtcgggggaccccattcagcctcc

SEQ ID NO: 31241 - RNA, 81 nt, synthetic construct
  source 1..81: mol_type = other RNA
ttctccgacaggtcctgccatttcaccaggaacatgtatacctgggggaaagccagagtcgggggaccccattcagcctcc

SEQ ID NO: 31242 - RNA, 82 nt, synthetic construct
  source 1..82: mol_type = other RNA
cttctccgacaggtcctgccatttcaccaggaacatgtaaacctgggggaaagccagagtcgggggaccccattcagcctcc

SEQ ID NO: 31243 - RNA, 82 nt, synthetic construct
  source 1..82: mol_type = other RNA
cttctccgacaggtcctgccatttcaccaggaacatgtacacctgggggaaagccagagtcgggggaccccattcagcctcc

SEQ ID NO: 31244 - RNA, 82 nt, synthetic construct
  source 1..82: mol_type = other RNA
cttctccgacaggtcctgccatttcaccaggaacatgtagacctgggggaaagccagagtcgggggaccccattcagcctcc

SEQ ID NO: 31245 - RNA, 82 nt, synthetic construct
  source 1..82: mol_type = other RNA
cttctccgacaggtcctgccatttcaccaggaacatgtatacctgggggaaagccagagtcgggggaccccattcagcctcc

SEQ ID NO: 31246 - RNA, 83 nt, synthetic construct
  source 1..83: mol_type = other RNA
ccttctccgacaggtcctgccatttcaccaggaacatgtagacctgggggaaagccagagtcgggggaccccattcagcctcc

SEQ ID NO: 31247 - RNA, 83 nt, synthetic construct
  source 1..83: mol_type = other RNA
ccttctccgacaggtcctgccatttcaccaggaacatgtacacctgggggaaagccagagtcgggggaccccattcagcctcc

SEQ ID NO: 31248 - RNA, 83 nt, synthetic construct
  source 1..83: mol_type = other RNA
ccttctccgacaggtcctgccatttcaccaggaacatgtaaacctgggggaaagccagagtcgggggaccccattcagcctcc

SEQ ID NO: 31249 - RNA, 83 nt, synthetic construct
  source 1..83: mol_type = other RNA
ccttctccgacaggtcctgccatttcaccaggaacatgtatacctgggggaaagccagagtcgggggaccccattcagcctcc

SEQ ID NO: 31250 - RNA, 84 nt, synthetic construct
  source 1..84: mol_type = other RNA
accttctccgacaggtcctgccatttcaccaggaacatgtatacctgggggaaagccagagtcgggggaccccattcagcctcc

SEQ ID NO: 31251 - RNA, 84 nt, synthetic construct
  source 1..84: mol_type = other RNA
accttctccgacaggtcctgccatttcaccaggaacatgtagacctgggggaaagccagagtcgggggaccccattcagcctcc

SEQ ID NO: 31252 - RNA, 84 nt, synthetic construct
  source 1..84: mol_type = other RNA
accttctccgacaggtcctgccatttcaccaggaacatgtacacctgggggaaagccagagtcgggggaccccattcagcctcc

SEQ ID NO: 31253 - RNA, 84 nt, synthetic construct
  source 1..84: mol_type = other RNA
accttctccgacaggtcctgccatttcaccaggaacatgtaaacctgggggaaagccagagtcgggggaccccattcagcctcc

SEQ ID NO: 31254 - RNA, 85 nt, synthetic construct
  source 1..85: mol_type = other RNA
caccttctccgacaggtcctgccatttcaccaggaacatgtatacctgggggaaagccagagtcgggggaccccattcagcctcc

SEQ ID NO: 31255 - RNA, 85 nt, synthetic construct
  source 1..85: mol_type = other RNA
caccttctccgacaggtcctgccatttcaccaggaacatgtagacctgggggaaagccagagtcgggggaccccattcagcctcc

SEQ ID NO: 31256 - RNA, 85 nt, synthetic construct
  source 1..85: mol_type = other RNA
caccttctccgacaggtcctgccatttcaccaggaacatgtaaacctgggggaaagccagagtcgggggaccccattcagcctcc

SEQ ID NO: 31257 - RNA, 85 nt, synthetic construct
  source 1..85: mol_type = other RNA
caccttctccgacaggtcctgccatttcaccaggaacatgtacacctgggggaaagccagagtcgggggaccccattcagcctcc

SEQ ID NO: 31258 - RNA, 86 nt, synthetic construct
  source 1..86: mol_type = other RNA
ccaccttctccgacaggtcctgccatttcaccaggaacatgtaaacctgggggaaagccagagtcgggggaccccattcagcctcc

SEQ ID NO: 31259 - RNA, 86 nt, synthetic construct
  source 1..86: mol_type = other RNA
ccaccttctccgacaggtcctgccatttcaccaggaacatgtatacctgggggaaagccagagtcgggggaccccattcagcctcc

SEQ ID NO: 31260 - RNA, 86 nt, synthetic construct
  source 1..86: mol_type = other RNA
ccaccttctccgacaggtcctgccatttcaccaggaacatgtagacctgggggaaagccagagtcgggggaccccattcagcctcc

SEQ ID NO: 31261 - RNA, 86 nt, synthetic construct
  source 1..86: mol_type = other RNA
ccaccttctccgacaggtcctgccatttcaccaggaacatgtacacctgggggaaagccagagtcgggggaccccattcagcctcc

SEQ ID NO: 31262 - RNA, 87 nt, synthetic construct
  source 1..87: mol_type = other RNA
accaccttctccgacaggtcctgccatttcaccaggaacatgtatacctgggggaaagccagagtcgggggaccccattcagcctcc

SEQ ID NO: 31263 - RNA, 87 nt, synthetic construct
  source 1..87: mol_type = other RNA
accaccttctccgacaggtcctgccatttcaccaggaacatgtagacctgggggaaagccagagtcgggggaccccattcagcctcc

SEQ ID NO: 31264 - RNA, 87 nt, synthetic construct
  source 1..87: mol_type = other RNA
accaccttctccgacaggtcctgccatttcaccaggaacatgtacacctgggggaaagccagagtcgggggaccccattcagcctcc

SEQ ID NO: 31265 - RNA, 87 nt, synthetic construct
  source 1..87: mol_type = other RNA
accaccttctccgacaggtcctgccatttcaccaggaacatgtaaacctgggggaaagccagagtcgggggaccccattcagcctcc

SEQ ID NO: 31266 - RNA, 88 nt, synthetic construct
  source 1..88: mol_type = other RNA
gaccaccttctccgacaggtcctgccatttcaccaggaacatgtagacctgggggaaagccagagtcgggggaccccattcagcctcc

SEQ ID NO: 31267 - RNA, 88 nt, synthetic construct
  source 1..88: mol_type = other RNA
gaccaccttctccgacaggtcctgccatttcaccaggaacatgtatacctgggggaaagccagagtcgggggaccccattcagcctcc

SEQ ID NO: 31268 - RNA, 88 nt, synthetic construct
  source 1..88: mol_type = other RNA
gaccaccttctccgacaggtcctgccatttcaccaggaacatgtacacctgggggaaagccagagtcgggggaccccattcagcctcc

SEQ ID NO: 31269 - RNA, 88 nt, synthetic construct
  source 1..88: mol_type = other RNA
gaccaccttctccgacaggtcctgccatttcaccaggaacatgtaaacctgggggaaagccagagtcgggggaccccattcagcctcc

SEQ ID NO: 31270 - RNA, 89 nt, synthetic construct
  source 1..89: mol_type = other RNA
agaccaccttctccgacaggtcctgccatttcaccaggaacatgtacacctgggggaaagccagagtcgggggaccccattcagcctcc

SEQ ID NO: 31271 - RNA, 89 nt, synthetic construct
  source 1..89: mol_type = other RNA
agaccaccttctccgacaggtcctgccatttcaccaggaacatgtaaacctgggggaaagccagagtcgggggaccccattcagcctcc

SEQ ID NO: 31272 - RNA, 89 nt, synthetic construct
  source 1..89: mol_type = other RNA
agaccaccttctccgacaggtcctgccatttcaccaggaacatgtagacctgggggaaagccagagtcgggggaccccattcagcctcc

SEQ ID NO: 31273 - RNA, 89 nt, synthetic construct
  source 1..89: mol_type = other RNA
agaccaccttctccgacaggtcctgccatttcaccaggaacatgtatacctgggggaaagccagagtcgggggaccccattcagcctcc

SEQ ID NO: 31274 - RNA, 90 nt, synthetic construct
  source 1..90: mol_type = other RNA
tagaccaccttctccgacaggtcctgccatttcaccaggaacatgtaaacctgggggaaagccagagtcgggggaccccattcagcctcc

SEQ ID NO: 31275 - RNA, 90 nt, synthetic construct
  source 1..90: mol_type = other RNA
tagaccaccttctccgacaggtcctgccatttcaccaggaacatgtagacctgggggaaagccagagtcgggggaccccattcagcctcc

SEQ ID NO: 31276 - RNA, 90 nt, synthetic construct
  source 1..90: mol_type = other RNA
tagaccaccttctccgacaggtcctgccatttcaccaggaacatgtacacctgggggaaagccagagtcgggggaccccattcagcctcc

SEQ ID NO: 31277 - RNA, 90 nt, synthetic construct
  source 1..90: mol_type = other RNA
tagaccaccttctccgacaggtcctgccatttcaccaggaacatgtatacctgggggaaagccagagtcgggggaccccattcagcctcc

SEQ ID NO: 31278 - RNA, 91 nt, synthetic construct
  source 1..91: mol_type = other RNA
gtagaccaccttctccgacaggtcctgccatttcaccaggaacatgtatacctgggggaaagccagagtcgggggaccccattcagcctcc

SEQ ID NO: 31279 - RNA, 91 nt, synthetic construct
  source 1..91: mol_type = other RNA
gtagaccaccttctccgacaggtcctgccatttcaccaggaacatgtaaacctgggggaaagccagagtcgggggaccccattcagcctcc

SEQ ID NO: 31280 - RNA, 91 nt, synthetic construct
  source 1..91: mol_type = other RNA
gtagaccaccttctccgacaggtcctgccatttcaccaggaacatgtagacctgggggaaagccagagtcgggggaccccattcagcctcc

SEQ ID NO: 31281 - RNA, 91 nt, synthetic construct
  source 1..91: mol_type = other RNA
gtagaccaccttctccgacaggtcctgccatttcaccaggaacatgtacacctgggggaaagccagagtcgggggaccccattcagcctcc

SEQ ID NO: 31282 - RNA, 92 nt, synthetic construct
  source 1..92: mol_type = other RNA
ggtagaccaccttctccgacaggtcctgccatttcaccaggaacatgtacacctgggggaaagccagagtcgggggaccccattcagcctcc

SEQ ID NO: 31283 - RNA, 92 nt, synthetic construct
  source 1..92: mol_type = other RNA
ggtagaccaccttctccgacaggtcctgccatttcaccaggaacatgtaaacctgggggaaagccagagtcgggggaccccattcagcctcc

SEQ ID NO: 31284 - RNA, 92 nt, synthetic construct
  source 1..92: mol_type = other RNA
ggtagaccaccttctccgacaggtcctgccatttcaccaggaacatgtatacctgggggaaagccagagtcgggggaccccattcagcctcc

SEQ ID NO: 31285 - RNA, 92 nt, synthetic construct
  source 1..92: mol_type = other RNA
ggtagaccaccttctccgacaggtcctgccatttcaccaggaacatgtagacctgggggaaagccagagtcgggggaccccattcagcctcc

SEQ ID NO: 31286 - RNA, 93 nt, synthetic construct
  source 1..93: mol_type = other RNA
cggtagaccaccttctccgacaggtcctgccatttcaccaggaacatgtatacctgggggaaagccagagtcgggggaccccattcagcctcc

SEQ ID NO: 31287 - RNA, 93 nt, synthetic construct
  source 1..93: mol_type = other RNA
cggtagaccaccttctccgacaggtcctgccatttcaccaggaacatgtacacctgggggaaagccagagtcgggggaccccattcagcctcc

SEQ ID NO: 31288 - RNA, 93 nt, synthetic construct
  source 1..93: mol_type = other RNA
cggtagaccaccttctccgacaggtcctgccatttcaccaggaacatgtaaacctgggggaaagccagagtcgggggaccccattcagcctcc

SEQ ID NO: 31289 - RNA, 93 nt, synthetic construct
  source 1..93: mol_type = other RNA
cggtagaccaccttctccgacaggtcctgccatttcaccaggaacatgtagacctgggggaaagccagagtcgggggaccccattcagcctcc

SEQ ID NO: 31290 - RNA, 94 nt, synthetic construct
  source 1..94: mol_type = other RNA
ccggtagaccaccttctccgacaggtcctgccatttcaccaggaacatgtatacctgggggaaagccagagtcgggggaccccattcagcctcc

SEQ ID NO: 31291 - RNA, 94 nt, synthetic construct
  source 1..94: mol_type = other RNA
ccggtagaccaccttctccgacaggtcctgccatttcaccaggaacatgtagacctgggggaaagccagagtcgggggaccccattcagcctcc

SEQ ID NO: 31292 - RNA, 94 nt, synthetic construct
  source 1..94: mol_type = other RNA
ccggtagaccaccttctccgacaggtcctgccatttcaccaggaacatgtacacctgggggaaagccagagtcgggggaccccattcagcctcc

SEQ ID NO: 31293 - RNA, 94 nt, synthetic construct
  source 1..94: mol_type = other RNA
ccggtagaccaccttctccgacaggtcctgccatttcaccaggaacatgtaaacctgggggaaagccagagtcgggggaccccattcagcctcc

SEQ ID NO: 31294 - RNA, 95 nt, synthetic construct
  source 1..95: mol_type = other RNA
gccggtagaccaccttctccgacaggtcctgccatttcaccaggaacatgtatacctgggggaaagccagagtcgggggaccccattcagcctcc

SEQ ID NO: 31295 - RNA, 95 nt, synthetic construct
  source 1..95: mol_type = other RNA
gccggtagaccaccttctccgacaggtcctgccatttcaccaggaacatgtaaacctgggggaaagccagagtcgggggaccccattcagcctcc

SEQ ID NO: 31296 - RNA, 95 nt, synthetic construct
  source 1..95: mol_type = other RNA
gccggtagaccaccttctccgacaggtcctgccatttcaccaggaacatgtacacctgggggaaagccagagtcgggggaccccattcagcctcc

SEQ ID NO: 31297 - RNA, 95 nt, synthetic construct
  source 1..95: mol_type = other RNA
gccggtagaccaccttctccgacaggtcctgccatttcaccaggaacatgtagacctgggggaaagccagagtcgggggaccccattcagcctcc

SEQ ID NO: 31298 - RNA, 96 nt, synthetic construct
  source 1..96: mol_type = other RNA
cgccggtagaccaccttctccgacaggtcctgccatttcaccaggaacatgtatacctgggggaaagccagagtcgggggaccccattcagcctcc

SEQ ID NO: 31299 - RNA, 96 nt, synthetic construct
  source 1..96: mol_type = other RNA
cgccggtagaccaccttctccgacaggtcctgccatttcaccaggaacatgtaaacctgggggaaagccagagtcgggggaccccattcagcctcc

SEQ ID NO: 31300 - RNA, 96 nt, synthetic construct
  source 1..96: mol_type = other RNA
cgccggtagaccaccttctccgacaggtcctgccatttcaccaggaacatgtacacctgggggaaagccagagtcgggggaccccattcagcctcc

SEQ ID NO: 31301 - RNA, 96 nt, synthetic construct
  source 1..96: mol_type = other RNA
cgccggtagaccaccttctccgacaggtcctgccatttcaccaggaacatgtagacctgggggaaagccagagtcgggggaccccattcagcctcc

SEQ ID NO: 31302 - RNA, 97 nt, synthetic construct
  source 1..97: mol_type = other RNA
gcgccggtagaccaccttctccgacaggtcctgccatttcaccaggaacatgtaaacctgggggaaagccagagtcgggggaccccattcagcctcc

SEQ ID NO: 31303 - RNA, 97 nt, synthetic construct
  source 1..97: mol_type = other RNA
gcgccggtagaccaccttctccgacaggtcctgccatttcaccaggaacatgtacacctgggggaaagccagagtcgggggaccccattcagcctcc

SEQ ID NO: 31304 - RNA, 97 nt, synthetic construct
  source 1..97: mol_type = other RNA
gcgccggtagaccaccttctccgacaggtcctgccatttcaccaggaacatgtagacctgggggaaagccagagtcgggggaccccattcagcctcc

SEQ ID NO: 31305 - RNA, 97 nt, synthetic construct
  source 1..97: mol_type = other RNA
gcgccggtagaccaccttctccgacaggtcctgccatttcaccaggaacatgtatacctgggggaaagccagagtcgggggaccccattcagcctcc

SEQ ID NO: 31306 - RNA, 98 nt, synthetic construct
  source 1..98: mol_type = other RNA
agcgccggtagaccaccttctccgacaggtcctgccatttcaccaggaacatgtatacctgggggaaagccagagtcgggggaccccattcagcctcc

SEQ ID NO: 31307 - RNA, 98 nt, synthetic construct
  source 1..98: mol_type = other RNA
agcgccggtagaccaccttctccgacaggtcctgccatttcaccaggaacatgtacacctgggggaaagccagagtcgggggaccccattcagcctcc

SEQ ID NO: 31308 - RNA, 98 nt, synthetic construct
  source 1..98: mol_type = other RNA
agcgccggtagaccaccttctccgacaggtcctgccatttcaccaggaacatgtaaacctgggggaaagccagagtcgggggaccccattcagcctcc

SEQ ID NO: 31309 - RNA, 98 nt, synthetic construct
  source 1..98: mol_type = other RNA
agcgccggtagaccaccttctccgacaggtcctgccatttcaccaggaacatgtagacctgggggaaagccagagtcgggggaccccattcagcctcc

SEQ ID NO: 31310 - RNA, 99 nt, synthetic construct
  source 1..99: mol_type = other RNA
aagcgccggtagaccaccttctccgacaggtcctgccatttcaccaggaacatgtagacctgggggaaagccagagtcgggggaccccattcagcctcc

SEQ ID NO: 31311 - RNA, 99 nt, synthetic construct
  source 1..99: mol_type = other RNA
aagcgccggtagaccaccttctccgacaggtcctgccatttcaccaggaacatgtaaacctgggggaaagccagagtcgggggaccccattcagcctcc

SEQ ID NO: 31312 - RNA, 99 nt, synthetic construct
  source 1..99: mol_type = other RNA
aagcgccggtagaccaccttctccgacaggtcctgccatttcaccaggaacatgtatacctgggggaaagccagagtcgggggaccccattcagcctcc

SEQ ID NO: 31313 - RNA, 99 nt, synthetic construct
  source 1..99: mol_type = other RNA
aagcgccggtagaccaccttctccgacaggtcctgccatttcaccaggaacatgtacacctgggggaaagccagagtcgggggaccccattcagcctcc

SEQ ID NO: 31314 - RNA, 100 nt, synthetic construct
  source 1..100: mol_type = other RNA
gaagcgccggtagaccaccttctccgacaggtcctgccatttcaccaggaacatgtatacctgggggaaagccagagtcgggggaccccattcagcctcc

SEQ ID NO: 31315 - RNA, 100 nt, synthetic construct
  source 1..100: mol_type = other RNA
gaagcgccggtagaccaccttctccgacaggtcctgccatttcaccaggaacatgtagacctgggggaaagccagagtcgggggaccccattcagcctcc

SEQ ID NO: 31316 - RNA, 100 nt, synthetic construct
  source 1..100: mol_type = other RNA
gaagcgccggtagaccaccttctccgacaggtcctgccatttcaccaggaacatgtacacctgggggaaagccagagtcgggggaccccattcagcctcc

SEQ ID NO: 31317 - RNA, 100 nt, synthetic construct
  source 1..100: mol_type = other RNA
gaagcgccggtagaccaccttctccgacaggtcctgccatttcaccaggaacatgtaaacctgggggaaagccagagtcgggggaccccattcagcctcc

SEQ ID NO: 31318 - RNA, 101 nt, synthetic construct
  source 1..101: mol_type = other RNA
tgaagcgccggtagaccaccttctccgacaggtcctgccatttcaccaggaacatgtatacctgggggaaagccagagtcgggggaccccattcagcctcc

SEQ ID NO: 31319 - RNA, 101 nt, synthetic construct
  source 1..101: mol_type = other RNA
tgaagcgccggtagaccaccttctccgacaggtcctgccatttcaccaggaacatgtagacctgggggaaagccagagtcgggggaccccattcagcctcc

SEQ ID NO: 31320 - RNA, 101 nt, synthetic construct
  source 1..101: mol_type = other RNA
tgaagcgccggtagaccaccttctccgacaggtcctgccatttcaccaggaacatgtacacctgggggaaagccagagtcgggggaccccattcagcctcc

SEQ ID NO: 31321 - RNA, 101 nt, synthetic construct
  source 1..101: mol_type = other RNA
tgaagcgccggtagaccaccttctccgacaggtcctgccatttcaccaggaacatgtaaacctgggggaaagccagagtcgggggaccccattcagcctcc

SEQ ID NO: 31322 - RNA, 102 nt, synthetic construct
  source 1..102: mol_type = other RNA
gtgaagcgccggtagaccaccttctccgacaggtcctgccatttcaccaggaacatgtatacctgggggaaagccagagtcgggggaccccattcagcctcc

SEQ ID NO: 31323 - RNA, 102 nt, synthetic construct
  source 1..102: mol_type = other RNA
gtgaagcgccggtagaccaccttctccgacaggtcctgccatttcaccaggaacatgtacacctgggggaaagccagagtcgggggaccccattcagcctcc

SEQ ID NO: 31324 - RNA, 102 nt, synthetic construct
  source 1..102: mol_type = other RNA
gtgaagcgccggtagaccaccttctccgacaggtcctgccatttcaccaggaacatgtagacctgggggaaagccagagtcgggggaccccattcagcctcc

SEQ ID NO: 31325 - RNA, 102 nt, synthetic construct
  source 1..102: mol_type = other RNA
gtgaagcgccggtagaccaccttctccgacaggtcctgccatttcaccaggaacatgtaaacctgggggaaagccagagtcgggggaccccattcagcctcc

SEQ ID NO: 31326 - RNA, 103 nt, synthetic construct
  source 1..103: mol_type = other RNA
ggtgaagcgccggtagaccaccttctccgacaggtcctgccatttcaccaggaacatgtacacctgggggaaagccagagtcgggggaccccattcagcctcc

SEQ ID NO: 31327 - RNA, 103 nt, synthetic construct
  source 1..103: mol_type = other RNA
ggtgaagcgccggtagaccaccttctccgacaggtcctgccatttcaccaggaacatgtatacctgggggaaagccagagtcgggggaccccattcagcctcc

SEQ ID NO: 31328 - RNA, 103 nt, synthetic construct
  source 1..103: mol_type = other RNA
ggtgaagcgccggtagaccaccttctccgacaggtcctgccatttcaccaggaacatgtaaacctgggggaaagccagagtcgggggaccccattcagcctcc

SEQ ID NO: 31329 - RNA, 103 nt, synthetic construct
  source 1..103: mol_type = other RNA
ggtgaagcgccggtagaccaccttctccgacaggtcctgccatttcaccaggaacatgtagacctgggggaaagccagagtcgggggaccccattcagcctcc

SEQ ID NO: 31330 - RNA, 16 nt, synthetic construct
  source 1..16: mol_type = other RNA
gctgaatggggtcccc

SEQ ID NO: 31331 - RNA, 17 nt, synthetic construct
  source 1..17: mol_type = other RNA
ggctgaatggggtcccc

SEQ ID NO: 31332 - RNA, 18 nt, synthetic construct
  source 1..18: mol_type = other RNA
aggctgaatggggtcccc

SEQ ID NO: 31333 - RNA, 19 nt, synthetic construct
  source 1..19: mol_type = other RNA
gaggctgaatggggtcccc

SEQ ID NO: 31334 - RNA, 20 nt, synthetic construct
  source 1..20: mol_type = other RNA
ggaggctgaatggggtcccc

SEQ ID NO: 31335 - RNA, 21 nt, synthetic construct
  source 1..21: mol_type = other RNA
tggaggctgaatggggtcccc

SEQ ID NO: 31336 - RNA, 22 nt, synthetic construct
  source 1..22: mol_type = other RNA
ttggaggctgaatggggtcccc

SEQ ID NO: 31337-31343 - skipped (7 entries)

SEQ ID NO: 31344 - RNA, 10 nt, synthetic construct
  source 1..10: mol_type = other RNA
gaccccattc

SEQ ID NO: 31345 - RNA, 11 nt, synthetic construct
  source 1..11: mol_type = other RNA
gaccccattca

SEQ ID NO: 31346 - RNA, 12 nt, synthetic construct
  source 1..12: mol_type = other RNA
gaccccattcag

SEQ ID NO: 31347 - RNA, 13 nt, synthetic construct
  source 1..13: mol_type = other RNA
gaccccattcagc

SEQ ID NO: 31348 - RNA, 14 nt, synthetic construct
  source 1..14: mol_type = other RNA
gaccccattcagcc

SEQ ID NO: 31349 - RNA, 15 nt, synthetic construct
  source 1..15: mol_type = other RNA
gaccccattcagcct

SEQ ID NO: 31350 - RNA, 16 nt, synthetic construct
  source 1..16: mol_type = other RNA
gaccccattcagcctc

SEQ ID NO: 31351 - RNA, 17 nt, synthetic construct
  source 1..17: mol_type = other RNA
gaccccattcagcctcc

SEQ ID NO: 31352 - RNA, 18 nt, synthetic construct
  source 1..18: mol_type = other RNA
gaccccattcagcctcca

SEQ ID NO: 31353 - RNA, 19 nt, synthetic construct
  source 1..19: mol_type = other RNA
gaccccattcagcctccaa

SEQ ID NO: 31354 - RNA, 25 nt, synthetic construct
  source 1..25: mol_type = other RNA
acctgggggaaagccagagtcgggg

SEQ ID NO: 31355 - RNA, 26 nt, synthetic construct
  source 1..26: mol_type = other RNA
aacctgggggaaagccagagtcgggg

SEQ ID NO: 31356 - RNA, 26 nt, synthetic construct
  source 1..26: mol_type = other RNA
gacctgggggaaagccagagtcgggg

SEQ ID NO: 31357 - RNA, 26 nt, synthetic construct
  source 1..26: mol_type = other RNA
cacctgggggaaagccagagtcgggg

SEQ ID NO: 31358 - RNA, 26 nt, synthetic construct
  source 1..26: mol_type = other RNA
tacctgggggaaagccagagtcgggg

SEQ ID NO: 31359 - RNA, 27 nt, synthetic construct
  source 1..27: mol_type = other RNA
aaacctgggggaaagccagagtcgggg

SEQ ID NO: 31360 - RNA, 27 nt, synthetic construct
  source 1..27: mol_type = other RNA
acacctgggggaaagccagagtcgggg

SEQ ID NO: 31361 - RNA, 27 nt, synthetic construct
  source 1..27: mol_type = other RNA
agacctgggggaaagccagagtcgggg

SEQ ID NO: 31362 - RNA, 27 nt, synthetic construct
  source 1..27: mol_type = other RNA
atacctgggggaaagccagagtcgggg

SEQ ID NO: 31363 - RNA, 28 nt, synthetic construct
  source 1..28: mol_type = other RNA
taaacctgggggaaagccagagtcgggg

SEQ ID NO: 31364 - RNA, 28 nt, synthetic construct
  source 1..28: mol_type = other RNA
tacacctgggggaaagccagagtcgggg

SEQ ID NO: 31365 - RNA, 28 nt, synthetic construct
  source 1..28: mol_type = other RNA
tagacctgggggaaagccagagtcgggg

SEQ ID NO: 31366 - RNA, 28 nt, synthetic construct
  source 1..28: mol_type = other RNA
tatacctgggggaaagccagagtcgggg

SEQ ID NO: 31367 - RNA, 29 nt, synthetic construct
  source 1..29: mol_type = other RNA
gtaaacctgggggaaagccagagtcgggg

SEQ ID NO: 31368 - RNA, 29 nt, synthetic construct
  source 1..29: mol_type = other RNA
gtagacctgggggaaagccagagtcgggg

SEQ ID NO: 31369 - RNA, 29 nt, synthetic construct
  source 1..29: mol_type = other RNA
gtatacctgggggaaagccagagtcgggg

SEQ ID NO: 31370 - RNA, 29 nt, synthetic construct
  source 1..29: mol_type = other RNA
gtacacctgggggaaagccagagtcgggg

SEQ ID NO: 31371 - RNA, 30 nt, synthetic construct
  source 1..30: mol_type = other RNA
tgtagacctgggggaaagccagagtcgggg

SEQ ID NO: 31372 - RNA, 30 nt, synthetic construct
  source 1..30: mol_type = other RNA
tgtaaacctgggggaaagccagagtcgggg

SEQ ID NO: 31373 - RNA, 30 nt, synthetic construct
  source 1..30: mol_type = other RNA
tgtatacctgggggaaagccagagtcgggg

SEQ ID NO: 31374 - RNA, 30 nt, synthetic construct
  source 1..30: mol_type = other RNA
tgtacacctgggggaaagccagagtcgggg

SEQ ID NO: 31375 - RNA, 31 nt, synthetic construct
  source 1..31: mol_type = other RNA
atgtacacctgggggaaagccagagtcgggg

SEQ ID NO: 31376 - RNA, 31 nt, synthetic construct
  source 1..31: mol_type = other RNA
atgtaaacctgggggaaagccagagtcgggg

SEQ ID NO: 31377 - RNA, 31 nt, synthetic construct
  source 1..31: mol_type = other RNA
atgtagacctgggggaaagccagagtcgggg

SEQ ID NO: 31378 - RNA, 31 nt, synthetic construct
  source 1..31: mol_type = other RNA
atgtatacctgggggaaagccagagtcgggg

SEQ ID NO: 31379 - RNA, 32 nt, synthetic construct
  source 1..32: mol_type = other RNA
catgtagacctgggggaaagccagagtcgggg

SEQ ID NO: 31380 - RNA, 32 nt, synthetic construct
  source 1..32: mol_type = other RNA
catgtaaacctgggggaaagccagagtcgggg

SEQ ID NO: 31381 - RNA, 32 nt, synthetic construct
  source 1..32: mol_type = other RNA
catgtatacctgggggaaagccagagtcgggg

SEQ ID NO: 31382 - RNA, 32 nt, synthetic construct
  source 1..32: mol_type = other RNA
catgtacacctgggggaaagccagagtcgggg

SEQ ID NO: 31383 - RNA, 33 nt, synthetic construct
  source 1..33: mol_type = other RNA
acatgtatacctgggggaaagccagagtcgggg

SEQ ID NO: 31384 - RNA, 33 nt, synthetic construct
  source 1..33: mol_type = other RNA
acatgtaaacctgggggaaagccagagtcgggg

SEQ ID NO: 31385 - RNA, 33 nt, synthetic construct
  source 1..33: mol_type = other RNA
acatgtacacctgggggaaagccagagtcgggg

SEQ ID NO: 31386 - RNA, 33 nt, synthetic construct
  source 1..33: mol_type = other RNA
acatgtagacctgggggaaagccagagtcgggg

SEQ ID NO: 31387 - RNA, 34 nt, synthetic construct
  source 1..34: mol_type = other RNA
aacatgtaaacctgggggaaagccagagtcgggg

SEQ ID NO: 31388 - RNA, 34 nt, synthetic construct
  source 1..34: mol_type = other RNA
aacatgtacacctgggggaaagccagagtcgggg

SEQ ID NO: 31389 - RNA, 34 nt, synthetic construct
  source 1..34: mol_type = other RNA
aacatgtagacctgggggaaagccagagtcgggg

SEQ ID NO: 31390 - RNA, 34 nt, synthetic construct
  source 1..34: mol_type = other RNA
aacatgtatacctgggggaaagccagagtcgggg

SEQ ID NO: 31391 - RNA, 35 nt, synthetic construct
  source 1..35: mol_type = other RNA
gaacatgtacacctgggggaaagccagagtcgggg

SEQ ID NO: 31392 - RNA, 35 nt, synthetic construct
  source 1..35: mol_type = other RNA
gaacatgtatacctgggggaaagccagagtcgggg

SEQ ID NO: 31393 - RNA, 35 nt, synthetic construct
  source 1..35: mol_type = other RNA
gaacatgtagacctgggggaaagccagagtcgggg

SEQ ID NO: 31394 - RNA, 35 nt, synthetic construct
  source 1..35: mol_type = other RNA
gaacatgtaaacctgggggaaagccagagtcgggg

SEQ ID NO: 31395 - RNA, 36 nt, synthetic construct
  source 1..36: mol_type = other RNA
ggaacatgtatacctgggggaaagccagagtcgggg

SEQ ID NO: 31396 - RNA, 36 nt, synthetic construct
  source 1..36: mol_type = other RNA
ggaacatgtacacctgggggaaagccagagtcgggg

SEQ ID NO: 31397 - RNA, 36 nt, synthetic construct
  source 1..36: mol_type = other RNA
ggaacatgtagacctgggggaaagccagagtcgggg

SEQ ID NO: 31398 - RNA, 36 nt, synthetic construct
  source 1..36: mol_type = other RNA
ggaacatgtaaacctgggggaaagccagagtcgggg

SEQ ID NO: 31399 - RNA, 37 nt, synthetic construct
  source 1..37: mol_type = other RNA
aggaacatgtaaacctgggggaaagccagagtcgggg

SEQ ID NO: 31400 - RNA, 37 nt, synthetic construct
  source 1..37: mol_type = other RNA
aggaacatgtacacctgggggaaagccagagtcgggg

SEQ ID NO: 31401 - RNA, 37 nt, synthetic construct
  source 1..37: mol_type = other RNA
aggaacatgtatacctgggggaaagccagagtcgggg

SEQ ID NO: 31402 - RNA, 37 nt, synthetic construct
  source 1..37: mol_type = other RNA
aggaacatgtagacctgggggaaagccagagtcgggg

SEQ ID NO: 31403 - RNA, 38 nt, synthetic construct
  source 1..38: mol_type = other RNA
caggaacatgtaaacctgggggaaagccagagtcgggg

SEQ ID NO: 31404 - RNA, 38 nt, synthetic construct
  source 1..38: mol_type = other RNA
caggaacatgtacacctgggggaaagccagagtcgggg

SEQ ID NO: 31405 - RNA, 38 nt, synthetic construct
  source 1..38: mol_type = other RNA
caggaacatgtagacctgggggaaagccagagtcgggg

SEQ ID NO: 31406 - RNA, 38 nt, synthetic construct
  source 1..38: mol_type = other RNA
caggaacatgtatacctgggggaaagccagagtcgggg

SEQ ID NO: 31407 - RNA, 39 nt, synthetic construct
  source 1..39: mol_type = other RNA
ccaggaacatgtacacctgggggaaagccagagtcgggg

SEQ ID NO: 31408 - RNA, 39 nt, synthetic construct
  source 1..39: mol_type = other RNA
ccaggaacatgtatacctgggggaaagccagagtcgggg

SEQ ID NO: 31409 - RNA, 39 nt, synthetic construct
  source 1..39: mol_type = other RNA
ccaggaacatgtagacctgggggaaagccagagtcgggg

SEQ ID NO: 31410 - RNA, 39 nt, synthetic construct
  source 1..39: mol_type = other RNA
ccaggaacatgtaaacctgggggaaagccagagtcgggg

SEQ ID NO: 31411 - RNA, 40 nt, synthetic construct
  source 1..40: mol_type = other RNA
accaggaacatgtaaacctgggggaaagccagagtcgggg

SEQ ID NO: 31412 - RNA, 40 nt, synthetic construct
  source 1..40: mol_type = other RNA
accaggaacatgtagacctgggggaaagccagagtcgggg

SEQ ID NO: 31413 - RNA, 40 nt, synthetic construct
  source 1..40: mol_type = other RNA
accaggaacatgtacacctgggggaaagccagagtcgggg

SEQ ID NO: 31414 - RNA, 40 nt, synthetic construct
  source 1..40: mol_type = other RNA
accaggaacatgtatacctgggggaaagccagagtcgggg

SEQ ID NO: 31415 - RNA, 41 nt, synthetic construct
  source 1..41: mol_type = other RNA
caccaggaacatgtagacctgggggaaagccagagtcgggg

SEQ ID NO: 31416 - RNA, 41 nt, synthetic construct
  source 1..41: mol_type = other RNA
caccaggaacatgtatacctgggggaaagccagagtcgggg

SEQ ID NO: 31417 - RNA, 41 nt, synthetic construct
  source 1..41: mol_type = other RNA
caccaggaacatgtaaacctgggggaaagccagagtcgggg

SEQ ID NO: 31418 - RNA, 41 nt, synthetic construct
  source 1..41: mol_type = other RNA
caccaggaacatgtacacctgggggaaagccagagtcgggg

SEQ ID NO: 31419 - RNA, 42 nt, synthetic construct
  source 1..42: mol_type = other RNA
tcaccaggaacatgtacacctgggggaaagccagagtcgggg

SEQ ID NO: 31420 - RNA, 42 nt, synthetic construct
  source 1..42: mol_type = other RNA
tcaccaggaacatgtagacctgggggaaagccagagtcgggg

SEQ ID NO: 31421 - RNA, 42 nt, synthetic construct
  source 1..42: mol_type = other RNA
tcaccaggaacatgtatacctgggggaaagccagagtcgggg

SEQ ID NO: 31422 - RNA, 42 nt, synthetic construct
  source 1..42: mol_type = other RNA
tcaccaggaacatgtaaacctgggggaaagccagagtcgggg

SEQ ID NO: 31423 - RNA, 43 nt, synthetic construct
  source 1..43: mol_type = other RNA
ttcaccaggaacatgtagacctgggggaaagccagagtcgggg

SEQ ID NO: 31424 - RNA, 43 nt, synthetic construct
  source 1..43: mol_type = other RNA
ttcaccaggaacatgtaaacctgggggaaagccagagtcgggg

SEQ ID NO: 31425 - RNA, 43 nt, synthetic construct
  source 1..43: mol_type = other RNA
ttcaccaggaacatgtatacctgggggaaagccagagtcgggg

SEQ ID NO: 31426 - RNA, 43 nt, synthetic construct
  source 1..43: mol_type = other RNA
ttcaccaggaacatgtacacctgggggaaagccagagtcgggg

SEQ ID NO: 31427 - RNA, 44 nt, synthetic construct
  source 1..44: mol_type = other RNA
tttcaccaggaacatgtagacctgggggaaagccagagtcgggg

SEQ ID NO: 31428 - RNA, 44 nt, synthetic construct
  source 1..44: mol_type = other RNA
tttcaccaggaacatgtacacctgggggaaagccagagtcgggg

SEQ ID NO: 31429 - RNA, 44 nt, synthetic construct
  source 1..44: mol_type = other RNA
tttcaccaggaacatgtaaacctgggggaaagccagagtcgggg

SEQ ID NO: 31430 - RNA, 44 nt, synthetic construct
  source 1..44: mol_type = other RNA
tttcaccaggaacatgtatacctgggggaaagccagagtcgggg

SEQ ID NO: 31431 - RNA, 45 nt, synthetic construct
  source 1..45: mol_type = other RNA
atttcaccaggaacatgtagacctgggggaaagccagagtcgggg

SEQ ID NO: 31432 - RNA, 45 nt, synthetic construct
  source 1..45: mol_type = other RNA
atttcaccaggaacatgtacacctgggggaaagccagagtcgggg

SEQ ID NO: 31433 - RNA, 45 nt, synthetic construct
  source 1..45: mol_type = other RNA
atttcaccaggaacatgtaaacctgggggaaagccagagtcgggg

SEQ ID NO: 31434 - RNA, 45 nt, synthetic construct
  source 1..45: mol_type = other RNA
atttcaccaggaacatgtatacctgggggaaagccagagtcgggg

SEQ ID NO: 31435 - RNA, 46 nt, synthetic construct
  source 1..46: mol_type = other RNA
catttcaccaggaacatgtatacctgggggaaagccagagtcgggg

SEQ ID NO: 31436 - RNA, 46 nt, synthetic construct
  source 1..46: mol_type = other RNA
catttcaccaggaacatgtagacctgggggaaagccagagtcgggg

SEQ ID NO: 31437 - RNA, 46 nt, synthetic construct
  source 1..46: mol_type = other RNA
catttcaccaggaacatgtacacctgggggaaagccagagtcgggg

SEQ ID NO: 31438 - RNA, 46 nt, synthetic construct
  source 1..46: mol_type = other RNA
catttcaccaggaacatgtaaacctgggggaaagccagagtcgggg

SEQ ID NO: 31439 - RNA, 47 nt, synthetic construct
  source 1..47: mol_type = other RNA
ccatttcaccaggaacatgtaaacctgggggaaagccagagtcgggg

SEQ ID NO: 31440 - RNA, 47 nt, synthetic construct
  source 1..47: mol_type = other RNA
ccatttcaccaggaacatgtagacctgggggaaagccagagtcgggg

SEQ ID NO: 31441 - RNA, 47 nt, synthetic construct
  source 1..47: mol_type = other RNA
ccatttcaccaggaacatgtacacctgggggaaagccagagtcgggg

SEQ ID NO: 31442 - RNA, 47 nt, synthetic construct
  source 1..47: mol_type = other RNA
ccatttcaccaggaacatgtatacctgggggaaagccagagtcgggg

SEQ ID NO: 31443 - RNA, 48 nt, synthetic construct
  source 1..48: mol_type = other RNA
gccatttcaccaggaacatgtagacctgggggaaagccagagtcgggg

SEQ ID NO: 31444 - RNA, 48 nt, synthetic construct
  source 1..48: mol_type = other RNA
gccatttcaccaggaacatgtaaacctgggggaaagccagagtcgggg

SEQ ID NO: 31445 - RNA, 48 nt, synthetic construct
  source 1..48: mol_type = other RNA
gccatttcaccaggaacatgtacacctgggggaaagccagagtcgggg

SEQ ID NO: 31446 - RNA, 48 nt, synthetic construct
  source 1..48: mol_type = other RNA
gccatttcaccaggaacatgtatacctgggggaaagccagagtcgggg

SEQ ID NO: 31447 - RNA, 49 nt, synthetic construct
  source 1..49: mol_type = other RNA
tgccatttcaccaggaacatgtaaacctgggggaaagccagagtcgggg

SEQ ID NO: 31448 - RNA, 49 nt, synthetic construct
  source 1..49: mol_type = other RNA
tgccatttcaccaggaacatgtagacctgggggaaagccagagtcgggg

SEQ ID NO: 31449 - RNA, 49 nt, synthetic construct
  source 1..49: mol_type = other RNA
tgccatttcaccaggaacatgtatacctgggggaaagccagagtcgggg

SEQ ID NO: 31450 - RNA, 49 nt, synthetic construct
  source 1..49: mol_type = other RNA
tgccatttcaccaggaacatgtacacctgggggaaagccagagtcgggg

SEQ ID NO: 31451 - RNA, 50 nt, synthetic construct
  source 1..50: mol_type = other RNA
ctgccatttcaccaggaacatgtacacctgggggaaagccagagtcgggg

SEQ ID NO: 31452 - RNA, 50 nt, synthetic construct
  source 1..50: mol_type = other RNA
ctgccatttcaccaggaacatgtaaacctgggggaaagccagagtcgggg

SEQ ID NO: 31453 - RNA, 50 nt, synthetic construct
  source 1..50: mol_type = other RNA
ctgccatttcaccaggaacatgtatacctgggggaaagccagagtcgggg

SEQ ID NO: 31454 - RNA, 50 nt, synthetic construct
  source 1..50: mol_type = other RNA
ctgccatttcaccaggaacatgtagacctgggggaaagccagagtcgggg

SEQ ID NO: 31455 - RNA, 51 nt, synthetic construct
  source 1..51: mol_type = other RNA
cctgccatttcaccaggaacatgtaaacctgggggaaagccagagtcgggg

SEQ ID NO: 31456 - RNA, 51 nt, synthetic construct
  source 1..51: mol_type = other RNA
cctgccatttcaccaggaacatgtagacctgggggaaagccagagtcgggg

SEQ ID NO: 31457 - RNA, 51 nt, synthetic construct
  source 1..51: mol_type = other RNA
cctgccatttcaccaggaacatgtatacctgggggaaagccagagtcgggg

SEQ ID NO: 31458 - RNA, 51 nt, synthetic construct
  source 1..51: mol_type = other RNA
cctgccatttcaccaggaacatgtacacctgggggaaagccagagtcgggg

SEQ ID NO: 31459 - RNA, 52 nt, synthetic construct
  source 1..52: mol_type = other RNA
tcctgccatttcaccaggaacatgtatacctgggggaaagccagagtcgggg

SEQ ID NO: 31460 - RNA, 52 nt, synthetic construct
  source 1..52: mol_type = other RNA
tcctgccatttcaccaggaacatgtaaacctgggggaaagccagagtcgggg

SEQ ID NO: 31461 - RNA, 52 nt, synthetic construct
  source 1..52: mol_type = other RNA
tcctgccatttcaccaggaacatgtagacctgggggaaagccagagtcgggg

SEQ ID NO: 31462 - RNA, 52 nt, synthetic construct
  source 1..52: mol_type = other RNA
tcctgccatttcaccaggaacatgtacacctgggggaaagccagagtcgggg

SEQ ID NO: 31463 - RNA, 53 nt, synthetic construct
  source 1..53: mol_type = other RNA
gtcctgccatttcaccaggaacatgtatacctgggggaaagccagagtcgggg

SEQ ID NO: 31464 - RNA, 53 nt, synthetic construct
  source 1..53: mol_type = other RNA
gtcctgccatttcaccaggaacatgtagacctgggggaaagccagagtcgggg

SEQ ID NO: 31465 - RNA, 53 nt, synthetic construct
  source 1..53: mol_type = other RNA
gtcctgccatttcaccaggaacatgtaaacctgggggaaagccagagtcgggg

SEQ ID NO: 31466 - RNA, 53 nt, synthetic construct
  source 1..53: mol_type = other RNA
gtcctgccatttcaccaggaacatgtacacctgggggaaagccagagtcgggg

SEQ ID NO: 31467 - RNA, 54 nt, synthetic construct
  source 1..54: mol_type = other RNA
ggtcctgccatttcaccaggaacatgtaaacctgggggaaagccagagtcgggg

SEQ ID NO: 31468 - RNA, 54 nt, synthetic construct
  source 1..54: mol_type = other RNA
ggtcctgccatttcaccaggaacatgtacacctgggggaaagccagagtcgggg

SEQ ID NO: 31469 - RNA, 54 nt, synthetic construct
  source 1..54: mol_type = other RNA
ggtcctgccatttcaccaggaacatgtagacctgggggaaagccagagtcgggg

SEQ ID NO: 31470 - RNA, 54 nt, synthetic construct
  source 1..54: mol_type = other RNA
ggtcctgccatttcaccaggaacatgtatacctgggggaaagccagagtcgggg

SEQ ID NO: 31471 - RNA, 55 nt, synthetic construct
  source 1..55: mol_type = other RNA
aggtcctgccatttcaccaggaacatgtatacctgggggaaagccagagtcgggg

SEQ ID NO: 31472 - RNA, 55 nt, synthetic construct
  source 1..55: mol_type = other RNA
aggtcctgccatttcaccaggaacatgtacacctgggggaaagccagagtcgggg

SEQ ID NO: 31473 - RNA, 55 nt, synthetic construct
  source 1..55: mol_type = other RNA
aggtcctgccatttcaccaggaacatgtagacctgggggaaagccagagtcgggg

SEQ ID NO: 31474 - RNA, 55 nt, synthetic construct
  source 1..55: mol_type = other RNA
aggtcctgccatttcaccaggaacatgtaaacctgggggaaagccagagtcgggg

SEQ ID NO: 31475 - RNA, 56 nt, synthetic construct
  source 1..56: mol_type = other RNA
caggtcctgccatttcaccaggaacatgtaaacctgggggaaagccagagtcgggg

SEQ ID NO: 31476 - RNA, 56 nt, synthetic construct
  source 1..56: mol_type = other RNA
caggtcctgccatttcaccaggaacatgtagacctgggggaaagccagagtcgggg

SEQ ID NO: 31477 - RNA, 56 nt, synthetic construct
  source 1..56: mol_type = other RNA
caggtcctgccatttcaccaggaacatgtacacctgggggaaagccagagtcgggg

SEQ ID NO: 31478 - RNA, 56 nt, synthetic construct
  source 1..56: mol_type = other RNA
caggtcctgccatttcaccaggaacatgtatacctgggggaaagccagagtcgggg

SEQ ID NO: 31479 - RNA, 57 nt, synthetic construct
  source 1..57: mol_type = other RNA
acaggtcctgccatttcaccaggaacatgtagacctgggggaaagccagagtcgggg

SEQ ID NO: 31480 - RNA, 57 nt, synthetic construct
  source 1..57: mol_type = other RNA
acaggtcctgccatttcaccaggaacatgtaaacctgggggaaagccagagtcgggg

SEQ ID NO: 31481 - RNA, 57 nt, synthetic construct
  source 1..57: mol_type = other RNA
acaggtcctgccatttcaccaggaacatgtacacctgggggaaagccagagtcgggg

SEQ ID NO: 31482 - RNA, 57 nt, synthetic construct
  source 1..57: mol_type = other RNA
acaggtcctgccatttcaccaggaacatgtatacctgggggaaagccagagtcgggg

SEQ ID NO: 31483 - RNA, 58 nt, synthetic construct
  source 1..58: mol_type = other RNA
gacaggtcctgccatttcaccaggaacatgtatacctgggggaaagccagagtcgggg

SEQ ID NO: 31484 - RNA, 58 nt, synthetic construct
  source 1..58: mol_type = other RNA
gacaggtcctgccatttcaccaggaacatgtagacctgggggaaagccagagtcgggg

SEQ ID NO: 31485 - RNA, 58 nt, synthetic construct
  source 1..58: mol_type = other RNA
gacaggtcctgccatttcaccaggaacatgtaaacctgggggaaagccagagtcgggg

SEQ ID NO: 31486 - RNA, 58 nt, synthetic construct
  source 1..58: mol_type = other RNA
gacaggtcctgccatttcaccaggaacatgtacacctgggggaaagccagagtcgggg

SEQ ID NO: 31487 - RNA, 59 nt, synthetic construct
  source 1..59: mol_type = other RNA
cgacaggtcctgccatttcaccaggaacatgtatacctgggggaaagccagagtcgggg

SEQ ID NO: 31488 - RNA, 59 nt, synthetic construct
  source 1..59: mol_type = other RNA
cgacaggtcctgccatttcaccaggaacatgtagacctgggggaaagccagagtcgggg

SEQ ID NO: 31489 - RNA, 59 nt, synthetic construct
  source 1..59: mol_type = other RNA
cgacaggtcctgccatttcaccaggaacatgtacacctgggggaaagccagagtcgggg

SEQ ID NO: 31490 - RNA, 59 nt, synthetic construct
  source 1..59: mol_type = other RNA
cgacaggtcctgccatttcaccaggaacatgtaaacctgggggaaagccagagtcgggg

SEQ ID NO: 31491 - RNA, 60 nt, synthetic construct
  source 1..60: mol_type = other RNA
ccgacaggtcctgccatttcaccaggaacatgtacacctgggggaaagccagagtcgggg

SEQ ID NO: 31492 - RNA, 60 nt, synthetic construct
  source 1..60: mol_type = other RNA
ccgacaggtcctgccatttcaccaggaacatgtagacctgggggaaagccagagtcgggg

SEQ ID NO: 31493 - RNA, 60 nt, synthetic construct
  source 1..60: mol_type = other RNA
ccgacaggtcctgccatttcaccaggaacatgtatacctgggggaaagccagagtcgggg

SEQ ID NO: 31494 - RNA, 60 nt, synthetic construct
  source 1..60: mol_type = other RNA
ccgacaggtcctgccatttcaccaggaacatgtaaacctgggggaaagccagagtcgggg

SEQ ID NO: 31495 - RNA, 61 nt, synthetic construct
  source 1..61: mol_type = other RNA
tccgacaggtcctgccatttcaccaggaacatgtacacctgggggaaagccagagtcgggg

SEQ ID NO: 31496 - RNA, 61 nt, synthetic construct
  source 1..61: mol_type = other RNA
tccgacaggtcctgccatttcaccaggaacatgtatacctgggggaaagccagagtcgggg

SEQ ID NO: 31497 - RNA, 61 nt, synthetic construct
  source 1..61: mol_type = other RNA
tccgacaggtcctgccatttcaccaggaacatgtaaacctgggggaaagccagagtcgggg

SEQ ID NO: 31498 - RNA, 61 nt, synthetic construct
  source 1..61: mol_type = other RNA
tccgacaggtcctgccatttcaccaggaacatgtagacctgggggaaagccagagtcgggg

SEQ ID NO: 31499 - RNA, 62 nt, synthetic construct
  source 1..62: mol_type = other RNA
ctccgacaggtcctgccatttcaccaggaacatgtagacctgggggaaagccagagtcgggg

SEQ ID NO: 31500 - RNA, 62 nt, synthetic construct
  source 1..62: mol_type = other RNA
ctccgacaggtcctgccatttcaccaggaacatgtaaacctgggggaaagccagagtcgggg

SEQ ID NO: 31501 - RNA, 62 nt, synthetic construct
  source 1..62: mol_type = other RNA
ctccgacaggtcctgccatttcaccaggaacatgtatacctgggggaaagccagagtcgggg

SEQ ID NO: 31502 - RNA, 62 nt, synthetic construct
  source 1..62: mol_type = other RNA
ctccgacaggtcctgccatttcaccaggaacatgtacacctgggggaaagccagagtcgggg

SEQ ID NO: 31503 - RNA, 63 nt, synthetic construct
  source 1..63: mol_type = other RNA
tctccgacaggtcctgccatttcaccaggaacatgtacacctgggggaaagccagagtcgggg

SEQ ID NO: 31504 - RNA, 63 nt, synthetic construct
  source 1..63: mol_type = other RNA
tctccgacaggtcctgccatttcaccaggaacatgtaaacctgggggaaagccagagtcgggg

SEQ ID NO: 31505 - RNA, 63 nt, synthetic construct
  source 1..63: mol_type = other RNA
tctccgacaggtcctgccatttcaccaggaacatgtatacctgggggaaagccagagtcgggg

SEQ ID NO: 31506 - RNA, 63 nt, synthetic construct
  source 1..63: mol_type = other RNA
tctccgacaggtcctgccatttcaccaggaacatgtagacctgggggaaagccagagtcgggg

SEQ ID NO: 31507 - RNA, 64 nt, synthetic construct
  source 1..64: mol_type = other RNA
ttctccgacaggtcctgccatttcaccaggaacatgtacacctgggggaaagccagagtcgggg

SEQ ID NO: 31508 - RNA, 64 nt, synthetic construct
  source 1..64: mol_type = other RNA
ttctccgacaggtcctgccatttcaccaggaacatgtagacctgggggaaagccagagtcgggg

SEQ ID NO: 31509 - RNA, 64 nt, synthetic construct
  source 1..64: mol_type = other RNA
ttctccgacaggtcctgccatttcaccaggaacatgtatacctgggggaaagccagagtcgggg

SEQ ID NO: 31510 - RNA, 64 nt, synthetic construct
  source 1..64: mol_type = other RNA
ttctccgacaggtcctgccatttcaccaggaacatgtaaacctgggggaaagccagagtcgggg

SEQ ID NO: 31511 - RNA, 65 nt, synthetic construct
  source 1..65: mol_type = other RNA
cttctccgacaggtcctgccatttcaccaggaacatgtaaacctgggggaaagccagagtcgggg

SEQ ID NO: 31512 - RNA, 65 nt, synthetic construct
  source 1..65: mol_type = other RNA
cttctccgacaggtcctgccatttcaccaggaacatgtagacctgggggaaagccagagtcgggg

SEQ ID NO: 31513 - RNA, 65 nt, synthetic construct
  source 1..65: mol_type = other RNA
cttctccgacaggtcctgccatttcaccaggaacatgtacacctgggggaaagccagagtcgggg

SEQ ID NO: 31514 - RNA, 65 nt, synthetic construct
  source 1..65: mol_type = other RNA
cttctccgacaggtcctgccatttcaccaggaacatgtatacctgggggaaagccagagtcgggg

SEQ ID NO: 31515 - RNA, 66 nt, synthetic construct
  source 1..66: mol_type = other RNA
ccttctccgacaggtcctgccatttcaccaggaacatgtagacctgggggaaagccagagtcgggg

SEQ ID NO: 31516 - RNA, 66 nt, synthetic construct
  source 1..66: mol_type = other RNA
ccttctccgacaggtcctgccatttcaccaggaacatgtacacctgggggaaagccagagtcgggg

SEQ ID NO: 31517 - RNA, 66 nt, synthetic construct
  source 1..66: mol_type = other RNA
ccttctccgacaggtcctgccatttcaccaggaacatgtaaacctgggggaaagccagagtcgggg

SEQ ID NO: 31518 - RNA, 66 nt, synthetic construct
  source 1..66: mol_type = other RNA
ccttctccgacaggtcctgccatttcaccaggaacatgtatacctgggggaaagccagagtcgggg

SEQ ID NO: 31519 - RNA, 67 nt, synthetic construct
  source 1..67: mol_type = other RNA
accttctccgacaggtcctgccatttcaccaggaacatgtaaacctgggggaaagccagagtcgggg

SEQ ID NO: 31520 - RNA, 67 nt, synthetic construct
  source 1..67: mol_type = other RNA
accttctccgacaggtcctgccatttcaccaggaacatgtagacctgggggaaagccagagtcgggg

SEQ ID NO: 31521 - RNA, 67 nt, synthetic construct
  source 1..67: mol_type = other RNA
accttctccgacaggtcctgccatttcaccaggaacatgtatacctgggggaaagccagagtcgggg

SEQ ID NO: 31522 - RNA, 67 nt, synthetic construct
  source 1..67: mol_type = other RNA
accttctccgacaggtcctgccatttcaccaggaacatgtacacctgggggaaagccagagtcgggg

SEQ ID NO: 31523 - RNA, 68 nt, synthetic construct
  source 1..68: mol_type = other RNA
caccttctccgacaggtcctgccatttcaccaggaacatgtagacctgggggaaagccagagtcgggg

SEQ ID NO: 31524 - RNA, 68 nt, synthetic construct
  source 1..68: mol_type = other RNA
caccttctccgacaggtcctgccatttcaccaggaacatgtaaacctgggggaaagccagagtcgggg

SEQ ID NO: 31525 - RNA, 68 nt, synthetic construct
  source 1..68: mol_type = other RNA
caccttctccgacaggtcctgccatttcaccaggaacatgtatacctgggggaaagccagagtcgggg

SEQ ID NO: 31526 - RNA, 68 nt, synthetic construct
  source 1..68: mol_type = other RNA
caccttctccgacaggtcctgccatttcaccaggaacatgtacacctgggggaaagccagagtcgggg

SEQ ID NO: 31527 - RNA, 69 nt, synthetic construct
  source 1..69: mol_type = other RNA
ccaccttctccgacaggtcctgccatttcaccaggaacatgtagacctgggggaaagccagagtcgggg

SEQ ID NO: 31528 - RNA, 69 nt, synthetic construct
  source 1..69: mol_type = other RNA
ccaccttctccgacaggtcctgccatttcaccaggaacatgtacacctgggggaaagccagagtcgggg

SEQ ID NO: 31529 - RNA, 69 nt, synthetic construct
  source 1..69: mol_type = other RNA
ccaccttctccgacaggtcctgccatttcaccaggaacatgtatacctgggggaaagccagagtcgggg

SEQ ID NO: 31530 - RNA, 69 nt, synthetic construct
  source 1..69: mol_type = other RNA
ccaccttctccgacaggtcctgccatttcaccaggaacatgtaaacctgggggaaagccagagtcgggg

SEQ ID NO: 31531 - RNA, 70 nt, synthetic construct
  source 1..70: mol_type = other RNA
accaccttctccgacaggtcctgccatttcaccaggaacatgtatacctgggggaaagccagagtcgggg

SEQ ID NO: 31532 - RNA, 70 nt, synthetic construct
  source 1..70: mol_type = other RNA
accaccttctccgacaggtcctgccatttcaccaggaacatgtaaacctgggggaaagccagagtcgggg

SEQ ID NO: 31533 - RNA, 70 nt, synthetic construct
  source 1..70: mol_type = other RNA
accaccttctccgacaggtcctgccatttcaccaggaacatgtagacctgggggaaagccagagtcgggg

SEQ ID NO: 31534 - RNA, 70 nt, synthetic construct
  source 1..70: mol_type = other RNA
accaccttctccgacaggtcctgccatttcaccaggaacatgtacacctgggggaaagccagagtcgggg

SEQ ID NO: 31535 - RNA, 71 nt, synthetic construct
  source 1..71: mol_type = other RNA
gaccaccttctccgacaggtcctgccatttcaccaggaacatgtatacctgggggaaagccagagtcgggg

SEQ ID NO: 31536 - RNA, 71 nt, synthetic construct
  source 1..71: mol_type = other RNA
gaccaccttctccgacaggtcctgccatttcaccaggaacatgtacacctgggggaaagccagagtcgggg

SEQ ID NO: 31537 - RNA, 71 nt, synthetic construct
  source 1..71: mol_type = other RNA
gaccaccttctccgacaggtcctgccatttcaccaggaacatgtaaacctgggggaaagccagagtcgggg

SEQ ID NO: 31538 - RNA, 71 nt, synthetic construct
  source 1..71: mol_type = other RNA
gaccaccttctccgacaggtcctgccatttcaccaggaacatgtagacctgggggaaagccagagtcgggg

SEQ ID NO: 31539 - RNA, 72 nt, synthetic construct
  source 1..72: mol_type = other RNA
agaccaccttctccgacaggtcctgccatttcaccaggaacatgtacacctgggggaaagccagagtcgggg

SEQ ID NO: 31540 - RNA, 72 nt, synthetic construct
  source 1..72: mol_type = other RNA
agaccaccttctccgacaggtcctgccatttcaccaggaacatgtaaacctgggggaaagccagagtcgggg

SEQ ID NO: 31541 - RNA, 72 nt, synthetic construct
  source 1..72: mol_type = other RNA
agaccaccttctccgacaggtcctgccatttcaccaggaacatgtatacctgggggaaagccagagtcgggg

SEQ ID NO: 31542 - RNA, 72 nt, synthetic construct
  source 1..72: mol_type = other RNA
agaccaccttctccgacaggtcctgccatttcaccaggaacatgtagacctgggggaaagccagagtcgggg

SEQ ID NO: 31543 - RNA, 73 nt, synthetic construct
  source 1..73: mol_type = other RNA
tagaccaccttctccgacaggtcctgccatttcaccaggaacatgtagacctgggggaaagccagagtcgggg

SEQ ID NO: 31544 - RNA, 73 nt, synthetic construct
  source 1..73: mol_type = other RNA
tagaccaccttctccgacaggtcctgccatttcaccaggaacatgtaaacctgggggaaagccagagtcgggg

SEQ ID NO: 31545 - RNA, 73 nt, synthetic construct
  source 1..73: mol_type = other RNA
tagaccaccttctccgacaggtcctgccatttcaccaggaacatgtatacctgggggaaagccagagtcgggg

SEQ ID NO: 31546 - RNA, 73 nt, synthetic construct
  source 1..73: mol_type = other RNA
tagaccaccttctccgacaggtcctgccatttcaccaggaacatgtacacctgggggaaagccagagtcgggg

SEQ ID NO: 31547 - RNA, 74 nt, synthetic construct
  source 1..74: mol_type = other RNA
gtagaccaccttctccgacaggtcctgccatttcaccaggaacatgtacacctgggggaaagccagagtcgggg

SEQ ID NO: 31548 - RNA, 74 nt, synthetic construct
  source 1..74: mol_type = other RNA
gtagaccaccttctccgacaggtcctgccatttcaccaggaacatgtagacctgggggaaagccagagtcgggg

SEQ ID NO: 31549 - RNA, 74 nt, synthetic construct
  source 1..74: mol_type = other RNA
gtagaccaccttctccgacaggtcctgccatttcaccaggaacatgtatacctgggggaaagccagagtcgggg

SEQ ID NO: 31550 - RNA, 74 nt, synthetic construct
  source 1..74: mol_type = other RNA
gtagaccaccttctccgacaggtcctgccatttcaccaggaacatgtaaacctgggggaaagccagagtcgggg

SEQ ID NO: 31551 - RNA, 75 nt, synthetic construct
  source 1..75: mol_type = other RNA
ggtagaccaccttctccgacaggtcctgccatttcaccaggaacatgtatacctgggggaaagccagagtcgggg

SEQ ID NO: 31552 - RNA, 75 nt, synthetic construct
  source 1..75: mol_type = other RNA
ggtagaccaccttctccgacaggtcctgccatttcaccaggaacatgtagacctgggggaaagccagagtcgggg

SEQ ID NO: 31553 - RNA, 75 nt, synthetic construct
  source 1..75: mol_type = other RNA
ggtagaccaccttctccgacaggtcctgccatttcaccaggaacatgtaaacctgggggaaagccagagtcgggg

SEQ ID NO: 31554 - RNA, 75 nt, synthetic construct
  source 1..75: mol_type = other RNA
ggtagaccaccttctccgacaggtcctgccatttcaccaggaacatgtacacctgggggaaagccagagtcgggg

SEQ ID NO: 31555 - RNA, 76 nt, synthetic construct
  source 1..76: mol_type = other RNA
cggtagaccaccttctccgacaggtcctgccatttcaccaggaacatgtagacctgggggaaagccagagtcgggg

SEQ ID NO: 31556 - RNA, 76 nt, synthetic construct
  source 1..76: mol_type = other RNA
cggtagaccaccttctccgacaggtcctgccatttcaccaggaacatgtaaacctgggggaaagccagagtcgggg

SEQ ID NO: 31557 - RNA, 76 nt, synthetic construct
  source 1..76: mol_type = other RNA
cggtagaccaccttctccgacaggtcctgccatttcaccaggaacatgtacacctgggggaaagccagagtcgggg

SEQ ID NO: 31558 - RNA, 76 nt, synthetic construct
  source 1..76: mol_type = other RNA
cggtagaccaccttctccgacaggtcctgccatttcaccaggaacatgtatacctgggggaaagccagagtcgggg

SEQ ID NO: 31559 - RNA, 77 nt, synthetic construct
  source 1..77: mol_type = other RNA
ccggtagaccaccttctccgacaggtcctgccatttcaccaggaacatgtaaacctgggggaaagccagagtcgggg

SEQ ID NO: 31560 - RNA, 77 nt, synthetic construct
  source 1..77: mol_type = other RNA
ccggtagaccaccttctccgacaggtcctgccatttcaccaggaacatgtagacctgggggaaagccagagtcgggg

SEQ ID NO: 31561 - RNA, 77 nt, synthetic construct
  source 1..77: mol_type = other RNA
ccggtagaccaccttctccgacaggtcctgccatttcaccaggaacatgtacacctgggggaaagccagagtcgggg

SEQ ID NO: 31562 - RNA, 77 nt, synthetic construct
  source 1..77: mol_type = other RNA
ccggtagaccaccttctccgacaggtcctgccatttcaccaggaacatgtatacctgggggaaagccagagtcgggg

SEQ ID NO: 31563 - RNA, 78 nt, synthetic construct
  source 1..78: mol_type = other RNA
gccggtagaccaccttctccgacaggtcctgccatttcaccaggaacatgtacacctgggggaaagccagagtcgggg

SEQ ID NO: 31564 - RNA, 78 nt, synthetic construct
  source 1..78: mol_type = other RNA
gccggtagaccaccttctccgacaggtcctgccatttcaccaggaacatgtaaacctgggggaaagccagagtcgggg

SEQ ID NO: 31565 - RNA, 78 nt, synthetic construct
  source 1..78: mol_type = other RNA
gccggtagaccaccttctccgacaggtcctgccatttcaccaggaacatgtatacctgggggaaagccagagtcgggg

SEQ ID NO: 31566 - RNA, 78 nt, synthetic construct
  source 1..78: mol_type = other RNA
gccggtagaccaccttctccgacaggtcctgccatttcaccaggaacatgtagacctgggggaaagccagagtcgggg

SEQ ID NO: 31567 - RNA, 79 nt, synthetic construct
  source 1..79: mol_type = other RNA
cgccggtagaccaccttctccgacaggtcctgccatttcaccaggaacatgtatacctgggggaaagccagagtcgggg

SEQ ID NO: 31568 - RNA, 79 nt, synthetic construct
  source 1..79: mol_type = other RNA
cgccggtagaccaccttctccgacaggtcctgccatttcaccaggaacatgtagacctgggggaaagccagagtcgggg

SEQ ID NO: 31569 - RNA, 79 nt, synthetic construct
  source 1..79: mol_type = other RNA
cgccggtagaccaccttctccgacaggtcctgccatttcaccaggaacatgtacacctgggggaaagccagagtcgggg

SEQ ID NO: 31570 - RNA, 79 nt, synthetic construct
  source 1..79: mol_type = other RNA
cgccggtagaccaccttctccgacaggtcctgccatttcaccaggaacatgtaaacctgggggaaagccagagtcgggg

SEQ ID NO: 31571 - RNA, 80 nt, synthetic construct
  source 1..80: mol_type = other RNA
gcgccggtagaccaccttctccgacaggtcctgccatttcaccaggaacatgtaaacctgggggaaagccagagtcgggg

SEQ ID NO: 31572 - RNA, 80 nt, synthetic construct
  source 1..80: mol_type = other RNA
gcgccggtagaccaccttctccgacaggtcctgccatttcaccaggaacatgtatacctgggggaaagccagagtcgggg

SEQ ID NO: 31573 - RNA, 80 nt, synthetic construct
  source 1..80: mol_type = other RNA
gcgccggtagaccaccttctccgacaggtcctgccatttcaccaggaacatgtagacctgggggaaagccagagtcgggg

SEQ ID NO: 31574 - RNA, 80 nt, synthetic construct
  source 1..80: mol_type = other RNA
gcgccggtagaccaccttctccgacaggtcctgccatttcaccaggaacatgtacacctgggggaaagccagagtcgggg

SEQ ID NO: 31575 - RNA, 81 nt, synthetic construct
  source 1..81: mol_type = other RNA
agcgccggtagaccaccttctccgacaggtcctgccatttcaccaggaacatgtatacctgggggaaagccagagtcgggg

SEQ ID NO: 31576 - RNA, 81 nt, synthetic construct
  source 1..81: mol_type = other RNA
agcgccggtagaccaccttctccgacaggtcctgccatttcaccaggaacatgtagacctgggggaaagccagagtcgggg

SEQ ID NO: 31577 - RNA, 81 nt, synthetic construct
  source 1..81: mol_type = other RNA
agcgccggtagaccaccttctccgacaggtcctgccatttcaccaggaacatgtaaacctgggggaaagccagagtcgggg

SEQ ID NO: 31578 - RNA, 81 nt, synthetic construct
  source 1..81: mol_type = other RNA
agcgccggtagaccaccttctccgacaggtcctgccatttcaccaggaacatgtacacctgggggaaagccagagtcgggg

SEQ ID NO: 31579 - RNA, 82 nt, synthetic construct
  source 1..82: mol_type = other RNA
aagcgccggtagaccaccttctccgacaggtcctgccatttcaccaggaacatgtacacctgggggaaagccagagtcgggg

SEQ ID NO: 31580 - RNA, 82 nt, synthetic construct
  source 1..82: mol_type = other RNA
aagcgccggtagaccaccttctccgacaggtcctgccatttcaccaggaacatgtatacctgggggaaagccagagtcgggg

SEQ ID NO: 31581 - RNA, 82 nt, synthetic construct
  source 1..82: mol_type = other RNA
aagcgccggtagaccaccttctccgacaggtcctgccatttcaccaggaacatgtaaacctgggggaaagccagagtcgggg

SEQ ID NO: 31582 - RNA, 82 nt, synthetic construct
  source 1..82: mol_type = other RNA
aagcgccggtagaccaccttctccgacaggtcctgccatttcaccaggaacatgtagacctgggggaaagccagagtcgggg

SEQ ID NO: 31583 - RNA, 83 nt, synthetic construct
  source 1..83: mol_type = other RNA
gaagcgccggtagaccaccttctccgacaggtcctgccatttcaccaggaacatgtagacctgggggaaagccagagtcgggg

SEQ ID NO: 31584 - RNA, 83 nt, synthetic construct
  source 1..83: mol_type = other RNA
gaagcgccggtagaccaccttctccgacaggtcctgccatttcaccaggaacatgtatacctgggggaaagccagagtcgggg

SEQ ID NO: 31585 - RNA, 83 nt, synthetic construct
  source 1..83: mol_type = other RNA
gaagcgccggtagaccaccttctccgacaggtcctgccatttcaccaggaacatgtacacctgggggaaagccagagtcgggg

SEQ ID NO: 31586 - RNA, 83 nt, synthetic construct
  source 1..83: mol_type = other RNA
gaagcgccggtagaccaccttctccgacaggtcctgccatttcaccaggaacatgtaaacctgggggaaagccagagtcgggg

SEQ ID NO: 31587 - RNA, 84 nt, synthetic construct
  source 1..84: mol_type = other RNA
tgaagcgccggtagaccaccttctccgacaggtcctgccatttcaccaggaacatgtatacctgggggaaagccagagtcgggg

SEQ ID NO: 31588 - RNA, 84 nt, synthetic construct
  source 1..84: mol_type = other RNA
tgaagcgccggtagaccaccttctccgacaggtcctgccatttcaccaggaacatgtagacctgggggaaagccagagtcgggg

SEQ ID NO: 31589 - RNA, 84 nt, synthetic construct
  source 1..84: mol_type = other RNA
tgaagcgccggtagaccaccttctccgacaggtcctgccatttcaccaggaacatgtacacctgggggaaagccagagtcgggg

SEQ ID NO: 31590 - RNA, 84 nt, synthetic construct
  source 1..84: mol_type = other RNA
tgaagcgccggtagaccaccttctccgacaggtcctgccatttcaccaggaacatgtaaacctgggggaaagccagagtcgggg

SEQ ID NO: 31591 - RNA, 85 nt, synthetic construct
  source 1..85: mol_type = other RNA
gtgaagcgccggtagaccaccttctccgacaggtcctgccatttcaccaggaacatgtatacctgggggaaagccagagtcgggg

SEQ ID NO: 31592 - RNA, 85 nt, synthetic construct
  source 1..85: mol_type = other RNA
gtgaagcgccggtagaccaccttctccgacaggtcctgccatttcaccaggaacatgtagacctgggggaaagccagagtcgggg

SEQ ID NO: 31593 - RNA, 85 nt, synthetic construct
  source 1..85: mol_type = other RNA
gtgaagcgccggtagaccaccttctccgacaggtcctgccatttcaccaggaacatgtacacctgggggaaagccagagtcgggg

SEQ ID NO: 31594 - RNA, 85 nt, synthetic construct
  source 1..85: mol_type = other RNA
gtgaagcgccggtagaccaccttctccgacaggtcctgccatttcaccaggaacatgtaaacctgggggaaagccagagtcgggg

SEQ ID NO: 31595 - RNA, 86 nt, synthetic construct
  source 1..86: mol_type = other RNA
ggtgaagcgccggtagaccaccttctccgacaggtcctgccatttcaccaggaacatgtatacctgggggaaagccagagtcgggg

SEQ ID NO: 31596 - RNA, 86 nt, synthetic construct
  source 1..86: mol_type = other RNA
ggtgaagcgccggtagaccaccttctccgacaggtcctgccatttcaccaggaacatgtaaacctgggggaaagccagagtcgggg

SEQ ID NO: 31597 - RNA, 86 nt, synthetic construct
  source 1..86: mol_type = other RNA
ggtgaagcgccggtagaccaccttctccgacaggtcctgccatttcaccaggaacatgtacacctgggggaaagccagagtcgggg

SEQ ID NO: 31598 - RNA, 86 nt, synthetic construct
  source 1..86: mol_type = other RNA
ggtgaagcgccggtagaccaccttctccgacaggtcctgccatttcaccaggaacatgtagacctgggggaaagccagagtcgggg

SEQ ID NO: 31599 - RNA, 87 nt, synthetic construct
  source 1..87: mol_type = other RNA
cggtgaagcgccggtagaccaccttctccgacaggtcctgccatttcaccaggaacatgtagacctgggggaaagccagagtcgggg

SEQ ID NO: 31600 - RNA, 87 nt, synthetic construct
  source 1..87: mol_type = other RNA
cggtgaagcgccggtagaccaccttctccgacaggtcctgccatttcaccaggaacatgtatacctgggggaaagccagagtcgggg

SEQ ID NO: 31601 - RNA, 87 nt, synthetic construct
  source 1..87: mol_type = other RNA
cggtgaagcgccggtagaccaccttctccgacaggtcctgccatttcaccaggaacatgtacacctgggggaaagccagagtcgggg

SEQ ID NO: 31602 - RNA, 87 nt, synthetic construct
  source 1..87: mol_type = other RNA
cggtgaagcgccggtagaccaccttctccgacaggtcctgccatttcaccaggaacatgtaaacctgggggaaagccagagtcgggg

SEQ ID NO: 31603 - RNA, 88 nt, synthetic construct
  source 1..88: mol_type = other RNA
tcggtgaagcgccggtagaccaccttctccgacaggtcctgccatttcaccaggaacatgtaaacctgggggaaagccagagtcgggg

SEQ ID NO: 31604 - RNA, 88 nt, synthetic construct
  source 1..88: mol_type = other RNA
tcggtgaagcgccggtagaccaccttctccgacaggtcctgccatttcaccaggaacatgtatacctgggggaaagccagagtcgggg

SEQ ID NO: 31605 - RNA, 88 nt, synthetic construct
  source 1..88: mol_type = other RNA
tcggtgaagcgccggtagaccaccttctccgacaggtcctgccatttcaccaggaacatgtacacctgggggaaagccagagtcgggg

SEQ ID NO: 31606 - RNA, 88 nt, synthetic construct
  source 1..88: mol_type = other RNA
tcggtgaagcgccggtagaccaccttctccgacaggtcctgccatttcaccaggaacatgtagacctgggggaaagccagagtcgggg

SEQ ID NO: 31607 - RNA, 89 nt, synthetic construct
  source 1..89: mol_type = other RNA
ctcggtgaagcgccggtagaccaccttctccgacaggtcctgccatttcaccaggaacatgtaaacctgggggaaagccagagtcgggg

SEQ ID NO: 31608 - RNA, 89 nt, synthetic construct
  source 1..89: mol_type = other RNA
ctcggtgaagcgccggtagaccaccttctccgacaggtcctgccatttcaccaggaacatgtatacctgggggaaagccagagtcgggg

SEQ ID NO: 31609 - RNA, 89 nt, synthetic construct
  source 1..89: mol_type = other RNA
ctcggtgaagcgccggtagaccaccttctccgacaggtcctgccatttcaccaggaacatgtacacctgggggaaagccagagtcgggg

SEQ ID NO: 31610 - RNA, 89 nt, synthetic construct
  source 1..89: mol_type = other RNA
ctcggtgaagcgccggtagaccaccttctccgacaggtcctgccatttcaccaggaacatgtagacctgggggaaagccagagtcgggg

SEQ ID NO: 31611 - RNA, 90 nt, synthetic construct
  source 1..90: mol_type = other RNA
tctcggtgaagcgccggtagaccaccttctccgacaggtcctgccatttcaccaggaacatgtaaacctgggggaaagccagagtcgggg

SEQ ID NO: 31612 - RNA, 90 nt, synthetic construct
  source 1..90: mol_type = other RNA
tctcggtgaagcgccggtagaccaccttctccgacaggtcctgccatttcaccaggaacatgtacacctgggggaaagccagagtcgggg

SEQ ID NO: 31613 - RNA, 90 nt, synthetic construct
  source 1..90: mol_type = other RNA
tctcggtgaagcgccggtagaccaccttctccgacaggtcctgccatttcaccaggaacatgtagacctgggggaaagccagagtcgggg

SEQ ID NO: 31614 - RNA, 90 nt, synthetic construct
  source 1..90: mol_type = other RNA
tctcggtgaagcgccggtagaccaccttctccgacaggtcctgccatttcaccaggaacatgtatacctgggggaaagccagagtcgggg

SEQ ID NO: 31615 - RNA, 91 nt, synthetic construct
  source 1..91: mol_type = other RNA
atctcggtgaagcgccggtagaccaccttctccgacaggtcctgccatttcaccaggaacatgtacacctgggggaaagccagagtcgggg

SEQ ID NO: 31616 - RNA, 91 nt, synthetic construct
  source 1..91: mol_type = other RNA
atctcggtgaagcgccggtagaccaccttctccgacaggtcctgccatttcaccaggaacatgtaaacctgggggaaagccagagtcgggg

SEQ ID NO: 31617 - RNA, 91 nt, synthetic construct
  source 1..91: mol_type = other RNA
atctcggtgaagcgccggtagaccaccttctccgacaggtcctgccatttcaccaggaacatgtatacctgggggaaagccagagtcgggg

SEQ ID NO: 31618 - RNA, 91 nt, synthetic construct
  source 1..91: mol_type = other RNA
atctcggtgaagcgccggtagaccaccttctccgacaggtcctgccatttcaccaggaacatgtagacctgggggaaagccagagtcgggg

SEQ ID NO: 31619 - RNA, 92 nt, synthetic construct
  source 1..92: mol_type = other RNA
gatctcggtgaagcgccggtagaccaccttctccgacaggtcctgccatttcaccaggaacatgtacacctgggggaaagccagagtcgggg

SEQ ID NO: 31620 - RNA, 92 nt, synthetic construct
  source 1..92: mol_type = other RNA
gatctcggtgaagcgccggtagaccaccttctccgacaggtcctgccatttcaccaggaacatgtatacctgggggaaagccagagtcgggg

SEQ ID NO: 31621 - RNA, 92 nt, synthetic construct
  source 1..92: mol_type = other RNA
gatctcggtgaagcgccggtagaccaccttctccgacaggtcctgccatttcaccaggaacatgtagacctgggggaaagccagagtcgggg

SEQ ID NO: 31622 - RNA, 92 nt, synthetic construct
  source 1..92: mol_type = other RNA
gatctcggtgaagcgccggtagaccaccttctccgacaggtcctgccatttcaccaggaacatgtaaacctgggggaaagccagagtcgggg

SEQ ID NO: 31623 - RNA, 93 nt, synthetic construct
  source 1..93: mol_type = other RNA
agatctcggtgaagcgccggtagaccaccttctccgacaggtcctgccatttcaccaggaacatgtagacctgggggaaagccagagtcgggg

SEQ ID NO: 31624 - RNA, 93 nt, synthetic construct
  source 1..93: mol_type = other RNA
agatctcggtgaagcgccggtagaccaccttctccgacaggtcctgccatttcaccaggaacatgtacacctgggggaaagccagagtcgggg

SEQ ID NO: 31625 - RNA, 93 nt, synthetic construct
  source 1..93: mol_type = other RNA
agatctcggtgaagcgccggtagaccaccttctccgacaggtcctgccatttcaccaggaacatgtatacctgggggaaagccagagtcgggg

SEQ ID NO: 31626 - RNA, 93 nt, synthetic construct
  source 1..93: mol_type = other RNA
agatctcggtgaagcgccggtagaccaccttctccgacaggtcctgccatttcaccaggaacatgtaaacctgggggaaagccagagtcgggg

SEQ ID NO: 31627 - RNA, 94 nt, synthetic construct
  source 1..94: mol_type = other RNA
tagatctcggtgaagcgccggtagaccaccttctccgacaggtcctgccatttcaccaggaacatgtatacctgggggaaagccagagtcgggg

SEQ ID NO: 31628 - RNA, 94 nt, synthetic construct
  source 1..94: mol_type = other RNA
tagatctcggtgaagcgccggtagaccaccttctccgacaggtcctgccatttcaccaggaacatgtaaacctgggggaaagccagagtcgggg

SEQ ID NO: 31629 - RNA, 94 nt, synthetic construct
  source 1..94: mol_type = other RNA
tagatctcggtgaagcgccggtagaccaccttctccgacaggtcctgccatttcaccaggaacatgtacacctgggggaaagccagagtcgggg

SEQ ID NO: 31630 - RNA, 94 nt, synthetic construct
  source 1..94: mol_type = other RNA
tagatctcggtgaagcgccggtagaccaccttctccgacaggtcctgccatttcaccaggaacatgtagacctgggggaaagccagagtcgggg

SEQ ID NO: 31631 - RNA, 95 nt, synthetic construct
  source 1..95: mol_type = other RNA
gtagatctcggtgaagcgccggtagaccaccttctccgacaggtcctgccatttcaccaggaacatgtacacctgggggaaagccagagtcgggg

SEQ ID NO: 31632 - RNA, 95 nt, synthetic construct
  source 1..95: mol_type = other RNA
gtagatctcggtgaagcgccggtagaccaccttctccgacaggtcctgccatttcaccaggaacatgtatacctgggggaaagccagagtcgggg

SEQ ID NO: 31633 - RNA, 95 nt, synthetic construct
  source 1..95: mol_type = other RNA
gtagatctcggtgaagcgccggtagaccaccttctccgacaggtcctgccatttcaccaggaacatgtagacctgggggaaagccagagtcgggg

SEQ ID NO: 31634 - RNA, 95 nt, synthetic construct
  source 1..95: mol_type = other RNA
gtagatctcggtgaagcgccggtagaccaccttctccgacaggtcctgccatttcaccaggaacatgtaaacctgggggaaagccagagtcgggg

SEQ ID NO: 31635 - RNA, 96 nt, synthetic construct
  source 1..96: mol_type = other RNA
cgtagatctcggtgaagcgccggtagaccaccttctccgacaggtcctgccatttcaccaggaacatgtatacctgggggaaagccagagtcgggg

SEQ ID NO: 31636 - RNA, 96 nt, synthetic construct
  source 1..96: mol_type = other RNA
cgtagatctcggtgaagcgccggtagaccaccttctccgacaggtcctgccatttcaccaggaacatgtagacctgggggaaagccagagtcgggg

SEQ ID NO: 31637 - RNA, 96 nt, synthetic construct
  source 1..96: mol_type = other RNA
cgtagatctcggtgaagcgccggtagaccaccttctccgacaggtcctgccatttcaccaggaacatgtacacctgggggaaagccagagtcgggg

SEQ ID NO: 31638 - RNA, 96 nt, synthetic construct
  source 1..96: mol_type = other RNA
cgtagatctcggtgaagcgccggtagaccaccttctccgacaggtcctgccatttcaccaggaacatgtaaacctgggggaaagccagagtcgggg

SEQ ID NO: 31639 - RNA, 97 nt, synthetic construct
  source 1..97: mol_type = other RNA
tcgtagatctcggtgaagcgccggtagaccaccttctccgacaggtcctgccatttcaccaggaacatgtatacctgggggaaagccagagtcgggg

SEQ ID NO: 31640 - RNA, 97 nt, synthetic construct
  source 1..97: mol_type = other RNA
tcgtagatctcggtgaagcgccggtagaccaccttctccgacaggtcctgccatttcaccaggaacatgtacacctgggggaaagccagagtcgggg

SEQ ID NO: 31641 - RNA, 97 nt, synthetic construct
  source 1..97: mol_type = other RNA
tcgtagatctcggtgaagcgccggtagaccaccttctccgacaggtcctgccatttcaccaggaacatgtagacctgggggaaagccagagtcgggg

SEQ ID NO: 31642 - RNA, 97 nt, synthetic construct
  source 1..97: mol_type = other RNA
tcgtagatctcggtgaagcgccggtagaccaccttctccgacaggtcctgccatttcaccaggaacatgtaaacctgggggaaagccagagtcgggg

SEQ ID NO: 31643 - RNA, 98 nt, synthetic construct
  source 1..98: mol_type = other RNA
ctcgtagatctcggtgaagcgccggtagaccaccttctccgacaggtcctgccatttcaccaggaacatgtaaacctgggggaaagccagagtcgggg

SEQ ID NO: 31644 - RNA, 98 nt, synthetic construct
  source 1..98: mol_type = other RNA
ctcgtagatctcggtgaagcgccggtagaccaccttctccgacaggtcctgccatttcaccaggaacatgtagacctgggggaaagccagagtcgggg

SEQ ID NO: 31645 - RNA, 98 nt, synthetic construct
  source 1..98: mol_type = other RNA
ctcgtagatctcggtgaagcgccggtagaccaccttctccgacaggtcctgccatttcaccaggaacatgtacacctgggggaaagccagagtcgggg

SEQ ID NO: 31646 - RNA, 98 nt, synthetic construct
  source 1..98: mol_type = other RNA
ctcgtagatctcggtgaagcgccggtagaccaccttctccgacaggtcctgccatttcaccaggaacatgtatacctgggggaaagccagagtcgggg

SEQ ID NO: 31647 - RNA, 99 nt, synthetic construct
  source 1..99: mol_type = other RNA
actcgtagatctcggtgaagcgccggtagaccaccttctccgacaggtcctgccatttcaccaggaacatgtacacctgggggaaagccagagtcgggg

SEQ ID NO: 31648 - RNA, 99 nt, synthetic construct
  source 1..99: mol_type = other RNA
actcgtagatctcggtgaagcgccggtagaccaccttctccgacaggtcctgccatttcaccaggaacatgtagacctgggggaaagccagagtcgggg

SEQ ID NO: 31649 - RNA, 99 nt, synthetic construct
  source 1..99: mol_type = other RNA
actcgtagatctcggtgaagcgccggtagaccaccttctccgacaggtcctgccatttcaccaggaacatgtaaacctgggggaaagccagagtcgggg

SEQ ID NO: 31650 - RNA, 99 nt, synthetic construct
  source 1..99: mol_type = other RNA
actcgtagatctcggtgaagcgccggtagaccaccttctccgacaggtcctgccatttcaccaggaacatgtatacctgggggaaagccagagtcgggg

SEQ ID NO: 31651 - RNA, 100 nt, synthetic construct
  source 1..100: mol_type = other RNA
aactcgtagatctcggtgaagcgccggtagaccaccttctccgacaggtcctgccatttcaccaggaacatgtaaacctgggggaaagccagagtcgggg

SEQ ID NO: 31652 - RNA, 100 nt, synthetic construct
  source 1..100: mol_type = other RNA
aactcgtagatctcggtgaagcgccggtagaccaccttctccgacaggtcctgccatttcaccaggaacatgtagacctgggggaaagccagagtcgggg

SEQ ID NO: 31653 - RNA, 100 nt, synthetic construct
  source 1..100: mol_type = other RNA
aactcgtagatctcggtgaagcgccggtagaccaccttctccgacaggtcctgccatttcaccaggaacatgtatacctgggggaaagccagagtcgggg

SEQ ID NO: 31654 - RNA, 100 nt, synthetic construct
  source 1..100: mol_type = other RNA
aactcgtagatctcggtgaagcgccggtagaccaccttctccgacaggtcctgccatttcaccaggaacatgtacacctgggggaaagccagagtcgggg

SEQ ID NO: 31655 - RNA, 101 nt, synthetic construct
  source 1..101: mol_type = other RNA
gaactcgtagatctcggtgaagcgccggtagaccaccttctccgacaggtcctgccatttcaccaggaacatgtatacctgggggaaagccagagtcgggg

SEQ ID NO: 31656 - RNA, 101 nt, synthetic construct
  source 1..101: mol_type = other RNA
gaactcgtagatctcggtgaagcgccggtagaccaccttctccgacaggtcctgccatttcaccaggaacatgtagacctgggggaaagccagagtcgggg

SEQ ID NO: 31657 - RNA, 101 nt, synthetic construct
  source 1..101: mol_type = other RNA
gaactcgtagatctcggtgaagcgccggtagaccaccttctccgacaggtcctgccatttcaccaggaacatgtaaacctgggggaaagccagagtcgggg

SEQ ID NO: 31658 - RNA, 101 nt, synthetic construct
  source 1..101: mol_type = other RNA
gaactcgtagatctcggtgaagcgccggtagaccaccttctccgacaggtcctgccatttcaccaggaacatgtacacctgggggaaagccagagtcgggg

SEQ ID NO: 31659 - RNA, 102 nt, synthetic construct
  source 1..102: mol_type = other RNA
ggaactcgtagatctcggtgaagcgccggtagaccaccttctccgacaggtcctgccatttcaccaggaacatgtaaacctgggggaaagccagagtcgggg

SEQ ID NO: 31660 - RNA, 102 nt, synthetic construct
  source 1..102: mol_type = other RNA
ggaactcgtagatctcggtgaagcgccggtagaccaccttctccgacaggtcctgccatttcaccaggaacatgtatacctgggggaaagccagagtcgggg

SEQ ID NO: 31661 - RNA, 102 nt, synthetic construct
  source 1..102: mol_type = other RNA
ggaactcgtagatctcggtgaagcgccggtagaccaccttctccgacaggtcctgccatttcaccaggaacatgtagacctgggggaaagccagagtcgggg

SEQ ID NO: 31662 - RNA, 102 nt, synthetic construct
  source 1..102: mol_type = other RNA
ggaactcgtagatctcggtgaagcgccggtagaccaccttctccgacaggtcctgccatttcaccaggaacatgtacacctgggggaaagccagagtcgggg

SEQ ID NO: 31663 - RNA, 103 nt, synthetic construct
  source 1..103: mol_type = other RNA
tggaactcgtagatctcggtgaagcgccggtagaccaccttctccgacaggtcctgccatttcaccaggaacatgtaaacctgggggaaagccagagtcgggg

SEQ ID NO: 31664 - RNA, 103 nt, synthetic construct
  source 1..103: mol_type = other RNA
tggaactcgtagatctcggtgaagcgccggtagaccaccttctccgacaggtcctgccatttcaccaggaacatgtatacctgggggaaagccagagtcgggg

SEQ ID NO: 31665 - RNA, 103 nt, synthetic construct
  source 1..103: mol_type = other RNA
tggaactcgtagatctcggtgaagcgccggtagaccaccttctccgacaggtcctgccatttcaccaggaacatgtagacctgggggaaagccagagtcgggg

SEQ ID NO: 31666 - RNA, 103 nt, synthetic construct
  source 1..103: mol_type = other RNA
tggaactcgtagatctcggtgaagcgccggtagaccaccttctccgacaggtcctgccatttcaccaggaacatgtacacctgggggaaagccagagtcgggg

SEQ ID NO: 31667 - RNA, 133 nt, synthetic construct
  source 1..133: mol_type = other RNA
ggaggctgaatggggtccccgttttagagctagaaatagcaagttaaaataaggctagtccgttatcaacttgaaaaagtggcaccgagtcggtgcgtacacctgggggaaagccagagtcgggggaccccat

SEQ ID NO: 31668 - RNA, 135 nt, synthetic construct
  source 1..135: mol_type = other RNA
ggaggctgaatggggtccccgttttagagctagaaatagcaagttaaaataaggctagtccgttatcaacttgaaaaagtggcaccgagtcggtgcgtacacctgggggaaagccagagtcgggggaccccattc

SEQ ID NO: 31669 - RNA, 135 nt, synthetic construct
  source 1..135: mol_type = other RNA
ggaggctgaatggggtccccgttttagagctagaaatagcaagttaaaataaggctagtccgttatcaacttgaaaaagtggcaccgagtcggtgcatgtacacctgggggaaagccagagtcgggggaccccat

SEQ ID NO: 31670 - RNA, 137 nt, synthetic construct
  source 1..137: mol_type = other RNA
ggaggctgaatggggtccccgttttagagctagaaatagcaagttaaaataaggctagtccgttatcaacttgaaaaagtggcaccgagtcggtgcgtacacctgggggaaagccagagtcgggggaccccattttt

SEQ ID NO: 31671 - RNA, 137 nt, synthetic construct
  source 1..137: mol_type = other RNA
ggaggctgaatggggtccccgttttagagctagaaatagcaagttaaaataaggctagtccgttatcaacttgaaaaagtggcaccgagtcggtgcgtacacctgggggaaagccagagtcgggggaccccattcag

SEQ ID NO: 31672 - RNA, 137 nt, synthetic construct
  source 1..137: mol_type = other RNA
ggaggctgaatggggtccccgttttagagctagaaatagcaagttaaaataaggctagtccgttatcaacttgaaaaagtggcaccgagtcggtgcatgtacacctgggggaaagccagagtcgggggaccccattc

SEQ ID NO: 31673 - RNA, 138 nt, synthetic construct
  source 1..138: mol_type = other RNA
ggaggctgaatggggtccccgttttagagctagaaatagcaagttaaaataaggctagtccgttatcaacttgaaaaagtggcaccgagtcggtgcaacatgtacacctgggggaaagccagagtcgggggaccccat

SEQ ID NO: 31674 - RNA, 139 nt, synthetic construct
  source 1..139: mol_type = other RNA
ggaggctgaatggggtccccgttttagagctagaaatagcaagttaaaataaggctagtccgttatcaacttgaaaaagtggcaccgagtcggtgcatgtacacctgggggaaagccagagtcgggggaccccattttt

SEQ ID NO: 31675 - RNA, 139 nt, synthetic construct
  source 1..139: mol_type = other RNA
ggaggctgaatggggtccccgttttagagctagaaatagcaagttaaaataaggctagtccgttatcaacttgaaaaagtggcaccgagtcggtgcatgtacacctgggggaaagccagagtcgggggaccccattcag

SEQ ID NO: 31676 - RNA, 139 nt, synthetic construct
  source 1..139: mol_type = other RNA
ggaggctgaatggggtccccgttttagagctagaaatagcaagttaaaataaggctagtccgttatcaacttgaaaaagtggcaccgagtcggtgcgtacacctgggggaaagccagagtcgggggaccccattctttt

SEQ ID NO: 31677 - RNA, 139 nt, synthetic construct
  source 1..139: mol_type = other RNA
ggaggctgaatggggtccccgttttagagctagaaatagcaagttaaaataaggctagtccgttatcaacttgaaaaagtggcaccgagtcggtgcgtacacctgggggaaagccagagtcgggggaccccattcagcc

SEQ ID NO: 31678 - RNA, 140 nt, synthetic construct
  source 1..140: mol_type = other RNA
ggaggctgaatggggtccccgttttagagctagaaatagcaagttaaaataaggctagtccgttatcaacttgaaaaagtggcaccgagtcggtgcggaacatgtacacctgggggaaagccagagtcgggggaccccat

SEQ ID NO: 31679 - RNA, 140 nt, synthetic construct
  source 1..140: mol_type = other RNA
ggaggctgaatggggtccccgttttagagctagaaatagcaagttaaaataaggctagtccgttatcaacttgaaaaagtggcaccgagtcggtgcaacatgtacacctgggggaaagccagagtcgggggaccccattc

SEQ ID NO: 31680 - RNA, 141 nt, synthetic construct
  source 1..141: mol_type = other RNA
ggaggctgaatggggtccccgttttagagctagaaatagcaagttaaaataaggctagtccgttatcaacttgaaaaagtggcaccgagtcggtgcatgtacacctgggggaaagccagagtcgggggaccccattctttt

SEQ ID NO: 31681 - RNA, 141 nt, synthetic construct
  source 1..141: mol_type = other RNA
ggaggctgaatggggtccccgttttagagctagaaatagcaagttaaaataaggctagtccgttatcaacttgaaaaagtggcaccgagtcggtgcatgtacacctgggggaaagccagagtcgggggaccccattcagcc

SEQ ID NO: 31682 - RNA, 141 nt, synthetic construct
  source 1..141: mol_type = other RNA
ggaggctgaatggggtccccgttttagagctagaaatagcaagttaaaataaggctagtccgttatcaacttgaaaaagtggcaccgagtcggtgcgtacacctgggggaaagccagagtcgggggaccccattcagtttt

SEQ ID NO: 31683 - RNA, 142 nt, synthetic construct
  source 1..142: mol_type = other RNA
ggaggctgaatggggtccccgttttagagctagaaatagcaagttaaaataaggctagtccgttatcaacttgaaaaagtggcaccgagtcggtgcaacatgtacacctgggggaaagccagagtcgggggaccccattttt

SEQ ID NO: 31684 - RNA, 142 nt, synthetic construct
  source 1..142: mol_type = other RNA
ggaggctgaatggggtccccgttttagagctagaaatagcaagttaaaataaggctagtccgttatcaacttgaaaaagtggcaccgagtcggtgcaacatgtacacctgggggaaagccagagtcgggggaccccattcag

SEQ ID NO: 31685 - RNA, 142 nt, synthetic construct
  source 1..142: mol_type = other RNA
ggaggctgaatggggtccccgttttagagctagaaatagcaagttaaaataaggctagtccgttatcaacttgaaaaagtggcaccgagtcggtgcggaacatgtacacctgggggaaagccagagtcgggggaccccattc

SEQ ID NO: 31686 - RNA, 143 nt, synthetic construct
  source 1..143: mol_type = other RNA
ggaggctgaatggggtccccgttttagagctagaaatagcaagttaaaataaggctagtccgttatcaacttgaaaaagtggcaccgagtcggtgcatgtacacctgggggaaagccagagtcgggggaccccattcagtttt

SEQ ID NO: 31687 - RNA, 143 nt, synthetic construct
  source 1..143: mol_type = other RNA
ggaggctgaatggggtccccgttttagagctagaaatagcaagttaaaataaggctagtccgttatcaacttgaaaaagtggcaccgagtcggtgcgtacacctgggggaaagccagagtcgggggaccccattcagcctttt

SEQ ID NO: 31688 - RNA, 144 nt, synthetic construct
  source 1..144: mol_type = other RNA
ggaggctgaatggggtccccgttttagagctagaaatagcaagttaaaataaggctagtccgttatcaacttgaaaaagtggcaccgagtcggtgcaacatgtacacctgggggaaagccagagtcgggggaccccattctttt

SEQ ID NO: 31689 - RNA, 144 nt, synthetic construct
  source 1..144: mol_type = other RNA
ggaggctgaatggggtccccgttttagagctagaaatagcaagttaaaataaggctagtccgttatcaacttgaaaaagtggcaccgagtcggtgcggaacatgtacacctgggggaaagccagagtcgggggaccccattttt

SEQ ID NO: 31690 - RNA, 144 nt, synthetic construct
  source 1..144: mol_type = other RNA
ggaggctgaatggggtccccgttttagagctagaaatagcaagttaaaataaggctagtccgttatcaacttgaaaaagtggcaccgagtcggtgcggaacatgtacacctgggggaaagccagagtcgggggaccccattcag

SEQ ID NO: 31691 - RNA, 144 nt, synthetic construct
  source 1..144: mol_type = other RNA
ggaggctgaatggggtccccgttttagagctagaaatagcaagttaaaataaggctagtccgttatcaacttgaaaaagtggcaccgagtcggtgcaacatgtacacctgggggaaagccagagtcgggggaccccattcagcc

SEQ ID NO: 31692 - RNA, 145 nt, synthetic construct
  source 1..145: mol_type = other RNA
ggaggctgaatggggtccccgttttagagctagaaatagcaagttaaaataaggctagtccgttatcaacttgaaaaagtggcaccgagtcggtgcatgtacacctgggggaaagccagagtcgggggaccccattcagcctttt

SEQ ID NO: 31693 - RNA, 146 nt, synthetic construct
  source 1..146: mol_type = other RNA
ggaggctgaatggggtccccgttttagagctagaaatagcaagttaaaataaggctagtccgttatcaacttgaaaaagtggcaccgagtcggtgcaacatgtacacctgggggaaagccagagtcgggggaccccattcagtttt

SEQ ID NO: 31694 - RNA, 146 nt, synthetic construct
  source 1..146: mol_type = other RNA
ggaggctgaatggggtccccgttttagagctagaaatagcaagttaaaataaggctagtccgttatcaacttgaaaaagtggcaccgagtcggtgcggaacatgtacacctgggggaaagccagagtcgggggaccccattctttt

SEQ ID NO: 31695 - RNA, 148 nt, synthetic construct
  source 1..148: mol_type = other RNA
ggaggctgaatggggtccccgttttagagctagaaatagcaagttaaaataaggctagtccgttatcaacttgaaaaagtggcaccgagtcggtgcaacatgtacacctgggggaaagccagagtcgggggaccccattcagcctttt

SEQ ID NO: 31696 - RNA, 148 nt, synthetic construct
  source 1..148: mol_type = other RNA
ggaggctgaatggggtccccgttttagagctagaaatagcaagttaaaataaggctagtccgttatcaacttgaaaaagtggcaccgagtcggtgcggaacatgtacacctgggggaaagccagagtcgggggaccccattcagtttt

SEQ ID NO: 31697 - RNA, 16 nt, synthetic construct
  source 1..16: mol_type = other RNA
aactcgtagatctcgg

SEQ ID NO: 31698 - RNA, 17 nt, synthetic construct
  source 1..17: mol_type = other RNA
gaactcgtagatctcgg

SEQ ID NO: 31699 - RNA, 18 nt, synthetic construct
  source 1..18: mol_type = other RNA
ggaactcgtagatctcgg

SEQ ID NO: 31700 - RNA, 19 nt, synthetic construct
  source 1..19: mol_type = other RNA
tggaactcgtagatctcgg

SEQ ID NO: 31701 - RNA, 20 nt, synthetic construct
  source 1..20: mol_type = other RNA
atggaactcgtagatctcgg

SEQ ID NO: 31702 - RNA, 21 nt, synthetic construct
  source 1..21: mol_type = other RNA
catggaactcgtagatctcgg

SEQ ID NO: 31703 - RNA, 22 nt, synthetic construct
  source 1..22: mol_type = other RNA
acatggaactcgtagatctcgg

SEQ ID NO: 31704-31709 - skipped (6 entries)

SEQ ID NO: 31710 - RNA, 10 nt, synthetic construct
  source 1..10: mol_type = other RNA
agatctacga

SEQ ID NO: 31711 - RNA, 11 nt, synthetic construct
  source 1..11: mol_type = other RNA
agatctacgag

SEQ ID NO: 31712 - RNA, 12 nt, synthetic construct
  source 1..12: mol_type = other RNA
agatctacgagt

SEQ ID NO: 31713 - RNA, 13 nt, synthetic construct
  source 1..13: mol_type = other RNA
agatctacgagtt

SEQ ID NO: 31714 - RNA, 14 nt, synthetic construct
  source 1..14: mol_type = other RNA
agatctacgagttc

SEQ ID NO: 31715 - RNA, 15 nt, synthetic construct
  source 1..15: mol_type = other RNA
agatctacgagttcc

SEQ ID NO: 31716 - RNA, 16 nt, synthetic construct
  source 1..16: mol_type = other RNA
agatctacgagttcca

SEQ ID NO: 31717 - RNA, 17 nt, synthetic construct
  source 1..17: mol_type = other RNA
agatctacgagttccat

SEQ ID NO: 31718 - RNA, 18 nt, synthetic construct
  source 1..18: mol_type = other RNA
agatctacgagttccatg

SEQ ID NO: 31719 - RNA, 19 nt, synthetic construct
  source 1..19: mol_type = other RNA
agatctacgagttccatgt

SEQ ID NO: 31720 - RNA, 64 nt, synthetic construct
  source 1..64: mol_type = other RNA
gtatacatgttcctggtgaaatggcaggacctgtcggagaaggtggtctaccggcgctttaccg

SEQ ID NO: 31721 - RNA, 64 nt, synthetic construct
  source 1..64: mol_type = other RNA
gtatacatgttcctggtgaaatggcaggacctgtcggagaaggtggtctaccggcgcttcaccg

SEQ ID NO: 31722 - RNA, 64 nt, synthetic construct
  source 1..64: mol_type = other RNA
gtttacatgttcctggtgaaatggcaggacctgtcggagaaggtggtctaccggcgctttaccg

SEQ ID NO: 31723 - RNA, 64 nt, synthetic construct
  source 1..64: mol_type = other RNA
gtctacatgttcctggtgaaatggcaggacctgtcggagaaggtggtctaccggcgcttcaccg

SEQ ID NO: 31724 - RNA, 64 nt, synthetic construct
  source 1..64: mol_type = other RNA
gtgtacatgttcctggtgaaatggcaggacctgtcggagaaggtggtctaccggcgctttaccg

SEQ ID NO: 31725 - RNA, 64 nt, synthetic construct
  source 1..64: mol_type = other RNA
gtttacatgttcctggtgaaatggcaggacctgtcggagaaggtggtctaccggcgcttcaccg

SEQ ID NO: 31726 - RNA, 64 nt, synthetic construct
  source 1..64: mol_type = other RNA
gtgtacatgttcctggtgaaatggcaggacctgtcggagaaggtggtctaccggcgcttcaccg

SEQ ID NO: 31727 - RNA, 64 nt, synthetic construct
  source 1..64: mol_type = other RNA
gtctacatgttcctggtgaaatggcaggacctgtcggagaaggtggtctaccggcgctttaccg

SEQ ID NO: 31728 - RNA, 65 nt, synthetic construct
  source 1..65: mol_type = other RNA
ggtttacatgttcctggtgaaatggcaggacctgtcggagaaggtggtctaccggcgcttcaccg

SEQ ID NO: 31729 - RNA, 65 nt, synthetic construct
  source 1..65: mol_type = other RNA
ggtgtacatgttcctggtgaaatggcaggacctgtcggagaaggtggtctaccggcgcttcaccg

SEQ ID NO: 31730 - RNA, 65 nt, synthetic construct
  source 1..65: mol_type = other RNA
ggtatacatgttcctggtgaaatggcaggacctgtcggagaaggtggtctaccggcgctttaccg

SEQ ID NO: 31731 - RNA, 65 nt, synthetic construct
  source 1..65: mol_type = other RNA
ggtatacatgttcctggtgaaatggcaggacctgtcggagaaggtggtctaccggcgcttcaccg

SEQ ID NO: 31732 - RNA, 65 nt, synthetic construct
  source 1..65: mol_type = other RNA
ggtctacatgttcctggtgaaatggcaggacctgtcggagaaggtggtctaccggcgcttcaccg

SEQ ID NO: 31733 - RNA, 65 nt, synthetic construct
  source 1..65: mol_type = other RNA
ggtctacatgttcctggtgaaatggcaggacctgtcggagaaggtggtctaccggcgctttaccg

SEQ ID NO: 31734 - RNA, 65 nt, synthetic construct
  source 1..65: mol_type = other RNA
ggtgtacatgttcctggtgaaatggcaggacctgtcggagaaggtggtctaccggcgctttaccg

SEQ ID NO: 31735 - RNA, 65 nt, synthetic construct
  source 1..65: mol_type = other RNA
ggtttacatgttcctggtgaaatggcaggacctgtcggagaaggtggtctaccggcgctttaccg

SEQ ID NO: 31736 - RNA, 66 nt, synthetic construct
  source 1..66: mol_type = other RNA
aggtgtacatgttcctggtgaaatggcaggacctgtcggagaaggtggtctaccggcgcttcaccg

SEQ ID NO: 31737 - RNA, 66 nt, synthetic construct
  source 1..66: mol_type = other RNA
aggtttacatgttcctggtgaaatggcaggacctgtcggagaaggtggtctaccggcgctttaccg

SEQ ID NO: 31738 - RNA, 66 nt, synthetic construct
  source 1..66: mol_type = other RNA
aggtttacatgttcctggtgaaatggcaggacctgtcggagaaggtggtctaccggcgcttcaccg

SEQ ID NO: 31739 - RNA, 66 nt, synthetic construct
  source 1..66: mol_type = other RNA
aggtgtacatgttcctggtgaaatggcaggacctgtcggagaaggtggtctaccggcgctttaccg

SEQ ID NO: 31740 - RNA, 66 nt, synthetic construct
  source 1..66: mol_type = other RNA
aggtctacatgttcctggtgaaatggcaggacctgtcggagaaggtggtctaccggcgctttaccg

SEQ ID NO: 31741 - RNA, 66 nt, synthetic construct
  source 1..66: mol_type = other RNA
aggtctacatgttcctggtgaaatggcaggacctgtcggagaaggtggtctaccggcgcttcaccg

SEQ ID NO: 31742 - RNA, 66 nt, synthetic construct
  source 1..66: mol_type = other RNA
aggtatacatgttcctggtgaaatggcaggacctgtcggagaaggtggtctaccggcgctttaccg

SEQ ID NO: 31743 - RNA, 66 nt, synthetic construct
  source 1..66: mol_type = other RNA
aggtatacatgttcctggtgaaatggcaggacctgtcggagaaggtggtctaccggcgcttcaccg

SEQ ID NO: 31744 - RNA, 67 nt, synthetic construct
  source 1..67: mol_type = other RNA
caggtttacatgttcctggtgaaatggcaggacctgtcggagaaggtggtctaccggcgctttaccg

SEQ ID NO: 31745 - RNA, 67 nt, synthetic construct
  source 1..67: mol_type = other RNA
caggtatacatgttcctggtgaaatggcaggacctgtcggagaaggtggtctaccggcgctttaccg

SEQ ID NO: 31746 - RNA, 67 nt, synthetic construct
  source 1..67: mol_type = other RNA
caggtgtacatgttcctggtgaaatggcaggacctgtcggagaaggtggtctaccggcgcttcaccg

SEQ ID NO: 31747 - RNA, 67 nt, synthetic construct
  source 1..67: mol_type = other RNA
caggtgtacatgttcctggtgaaatggcaggacctgtcggagaaggtggtctaccggcgctttaccg

SEQ ID NO: 31748 - RNA, 67 nt, synthetic construct
  source 1..67: mol_type = other RNA
caggtctacatgttcctggtgaaatggcaggacctgtcggagaaggtggtctaccggcgcttcaccg

SEQ ID NO: 31749 - RNA, 67 nt, synthetic construct
  source 1..67: mol_type = other RNA
caggtctacatgttcctggtgaaatggcaggacctgtcggagaaggtggtctaccggcgctttaccg

SEQ ID NO: 31750 - RNA, 67 nt, synthetic construct
  source 1..67: mol_type = other RNA
caggtttacatgttcctggtgaaatggcaggacctgtcggagaaggtggtctaccggcgcttcaccg

SEQ ID NO: 31751 - RNA, 67 nt, synthetic construct
  source 1..67: mol_type = other RNA
caggtatacatgttcctggtgaaatggcaggacctgtcggagaaggtggtctaccggcgcttcaccg

SEQ ID NO: 31752 - RNA, 68 nt, synthetic construct
  source 1..68: mol_type = other RNA
ccaggtttacatgttcctggtgaaatggcaggacctgtcggagaaggtggtctaccggcgcttcaccg

SEQ ID NO: 31753 - RNA, 68 nt, synthetic construct
  source 1..68: mol_type = other RNA
ccaggtgtacatgttcctggtgaaatggcaggacctgtcggagaaggtggtctaccggcgctttaccg

SEQ ID NO: 31754 - RNA, 68 nt, synthetic construct
  source 1..68: mol_type = other RNA
ccaggtctacatgttcctggtgaaatggcaggacctgtcggagaaggtggtctaccggcgcttcaccg

SEQ ID NO: 31755 - RNA, 68 nt, synthetic construct
  source 1..68: mol_type = other RNA
ccaggtatacatgttcctggtgaaatggcaggacctgtcggagaaggtggtctaccggcgcttcaccg

SEQ ID NO: 31756 - RNA, 68 nt, synthetic construct
  source 1..68: mol_type = other RNA
ccaggtatacatgttcctggtgaaatggcaggacctgtcggagaaggtggtctaccggcgctttaccg

SEQ ID NO: 31757 - RNA, 68 nt, synthetic construct
  source 1..68: mol_type = other RNA
ccaggtgtacatgttcctggtgaaatggcaggacctgtcggagaaggtggtctaccggcgcttcaccg

SEQ ID NO: 31758 - RNA, 68 nt, synthetic construct
  source 1..68: mol_type = other RNA
ccaggtttacatgttcctggtgaaatggcaggacctgtcggagaaggtggtctaccggcgctttaccg

SEQ ID NO: 31759 - RNA, 68 nt, synthetic construct
  source 1..68: mol_type = other RNA
ccaggtctacatgttcctggtgaaatggcaggacctgtcggagaaggtggtctaccggcgctttaccg

SEQ ID NO: 31760 - RNA, 69 nt, synthetic construct
  source 1..69: mol_type = other RNA
cccaggtctacatgttcctggtgaaatggcaggacctgtcggagaaggtggtctaccggcgctttaccg

SEQ ID NO: 31761 - RNA, 69 nt, synthetic construct
  source 1..69: mol_type = other RNA
cccaggtatacatgttcctggtgaaatggcaggacctgtcggagaaggtggtctaccggcgcttcaccg

SEQ ID NO: 31762 - RNA, 69 nt, synthetic construct
  source 1..69: mol_type = other RNA
cccaggtttacatgttcctggtgaaatggcaggacctgtcggagaaggtggtctaccggcgctttaccg

SEQ ID NO: 31763 - RNA, 69 nt, synthetic construct
  source 1..69: mol_type = other RNA
cccaggtttacatgttcctggtgaaatggcaggacctgtcggagaaggtggtctaccggcgcttcaccg

SEQ ID NO: 31764 - RNA, 69 nt, synthetic construct
  source 1..69: mol_type = other RNA
cccaggtgtacatgttcctggtgaaatggcaggacctgtcggagaaggtggtctaccggcgctttaccg

SEQ ID NO: 31765 - RNA, 69 nt, synthetic construct
  source 1..69: mol_type = other RNA
cccaggtatacatgttcctggtgaaatggcaggacctgtcggagaaggtggtctaccggcgctttaccg

SEQ ID NO: 31766 - RNA, 69 nt, synthetic construct
  source 1..69: mol_type = other RNA
cccaggtgtacatgttcctggtgaaatggcaggacctgtcggagaaggtggtctaccggcgcttcaccg

SEQ ID NO: 31767 - RNA, 69 nt, synthetic construct
  source 1..69: mol_type = other RNA
cccaggtctacatgttcctggtgaaatggcaggacctgtcggagaaggtggtctaccggcgcttcaccg

SEQ ID NO: 31768 - RNA, 70 nt, synthetic construct
  source 1..70: mol_type = other RNA
ccccaggtttacatgttcctggtgaaatggcaggacctgtcggagaaggtggtctaccggcgctttaccg

SEQ ID NO: 31769 - RNA, 70 nt, synthetic construct
  source 1..70: mol_type = other RNA
ccccaggtatacatgttcctggtgaaatggcaggacctgtcggagaaggtggtctaccggcgcttcaccg

SEQ ID NO: 31770 - RNA, 70 nt, synthetic construct
  source 1..70: mol_type = other RNA
ccccaggtgtacatgttcctggtgaaatggcaggacctgtcggagaaggtggtctaccggcgctttaccg

SEQ ID NO: 31771 - RNA, 70 nt, synthetic construct
  source 1..70: mol_type = other RNA
ccccaggtttacatgttcctggtgaaatggcaggacctgtcggagaaggtggtctaccggcgcttcaccg

SEQ ID NO: 31772 - RNA, 70 nt, synthetic construct
  source 1..70: mol_type = other RNA
ccccaggtatacatgttcctggtgaaatggcaggacctgtcggagaaggtggtctaccggcgctttaccg

SEQ ID NO: 31773 - RNA, 70 nt, synthetic construct
  source 1..70: mol_type = other RNA
ccccaggtctacatgttcctggtgaaatggcaggacctgtcggagaaggtggtctaccggcgctttaccg

SEQ ID NO: 31774 - RNA, 70 nt, synthetic construct
  source 1..70: mol_type = other RNA
ccccaggtctacatgttcctggtgaaatggcaggacctgtcggagaaggtggtctaccggcgcttcaccg

SEQ ID NO: 31775 - RNA, 70 nt, synthetic construct
  source 1..70: mol_type = other RNA
ccccaggtgtacatgttcctggtgaaatggcaggacctgtcggagaaggtggtctaccggcgcttcaccg

SEQ ID NO: 31776 - RNA, 71 nt, synthetic construct
  source 1..71: mol_type = other RNA
cccccaggtatacatgttcctggtgaaatggcaggacctgtcggagaaggtggtctaccggcgcttcaccg

SEQ ID NO: 31777 - RNA, 71 nt, synthetic construct
  source 1..71: mol_type = other RNA
cccccaggtgtacatgttcctggtgaaatggcaggacctgtcggagaaggtggtctaccggcgctttaccg

SEQ ID NO: 31778 - RNA, 71 nt, synthetic construct
  source 1..71: mol_type = other RNA
cccccaggtatacatgttcctggtgaaatggcaggacctgtcggagaaggtggtctaccggcgctttaccg

SEQ ID NO: 31779 - RNA, 71 nt, synthetic construct
  source 1..71: mol_type = other RNA
cccccaggtctacatgttcctggtgaaatggcaggacctgtcggagaaggtggtctaccggcgctttaccg

SEQ ID NO: 31780 - RNA, 71 nt, synthetic construct
  source 1..71: mol_type = other RNA
cccccaggtgtacatgttcctggtgaaatggcaggacctgtcggagaaggtggtctaccggcgcttcaccg

SEQ ID NO: 31781 - RNA, 71 nt, synthetic construct
  source 1..71: mol_type = other RNA
cccccaggtctacatgttcctggtgaaatggcaggacctgtcggagaaggtggtctaccggcgcttcaccg

SEQ ID NO: 31782 - RNA, 71 nt, synthetic construct
  source 1..71: mol_type = other RNA
cccccaggtttacatgttcctggtgaaatggcaggacctgtcggagaaggtggtctaccggcgctttaccg

SEQ ID NO: 31783 - RNA, 71 nt, synthetic construct
  source 1..71: mol_type = other RNA
cccccaggtttacatgttcctggtgaaatggcaggacctgtcggagaaggtggtctaccggcgcttcaccg

SEQ ID NO: 31784 - RNA, 72 nt, synthetic construct
  source 1..72: mol_type = other RNA
tcccccaggtctacatgttcctggtgaaatggcaggacctgtcggagaaggtggtctaccggcgctttaccg

SEQ ID NO: 31785 - RNA, 72 nt, synthetic construct
  source 1..72: mol_type = other RNA
tcccccaggtttacatgttcctggtgaaatggcaggacctgtcggagaaggtggtctaccggcgcttcaccg

SEQ ID NO: 31786 - RNA, 72 nt, synthetic construct
  source 1..72: mol_type = other RNA
tcccccaggtctacatgttcctggtgaaatggcaggacctgtcggagaaggtggtctaccggcgcttcaccg

SEQ ID NO: 31787 - RNA, 72 nt, synthetic construct
  source 1..72: mol_type = other RNA
tcccccaggtatacatgttcctggtgaaatggcaggacctgtcggagaaggtggtctaccggcgctttaccg

SEQ ID NO: 31788 - RNA, 72 nt, synthetic construct
  source 1..72: mol_type = other RNA
tcccccaggtatacatgttcctggtgaaatggcaggacctgtcggagaaggtggtctaccggcgcttcaccg

SEQ ID NO: 31789 - RNA, 72 nt, synthetic construct
  source 1..72: mol_type = other RNA
tcccccaggtttacatgttcctggtgaaatggcaggacctgtcggagaaggtggtctaccggcgctttaccg

SEQ ID NO: 31790 - RNA, 72 nt, synthetic construct
  source 1..72: mol_type = other RNA
tcccccaggtgtacatgttcctggtgaaatggcaggacctgtcggagaaggtggtctaccggcgcttcaccg

SEQ ID NO: 31791 - RNA, 72 nt, synthetic construct
  source 1..72: mol_type = other RNA
tcccccaggtgtacatgttcctggtgaaatggcaggacctgtcggagaaggtggtctaccggcgctttaccg

SEQ ID NO: 31792 - RNA, 73 nt, synthetic construct
  source 1..73: mol_type = other RNA
ttcccccaggtctacatgttcctggtgaaatggcaggacctgtcggagaaggtggtctaccggcgcttcaccg

SEQ ID NO: 31793 - RNA, 73 nt, synthetic construct
  source 1..73: mol_type = other RNA
ttcccccaggtatacatgttcctggtgaaatggcaggacctgtcggagaaggtggtctaccggcgctttaccg

SEQ ID NO: 31794 - RNA, 73 nt, synthetic construct
  source 1..73: mol_type = other RNA
ttcccccaggtttacatgttcctggtgaaatggcaggacctgtcggagaaggtggtctaccggcgctttaccg

SEQ ID NO: 31795 - RNA, 73 nt, synthetic construct
  source 1..73: mol_type = other RNA
ttcccccaggtttacatgttcctggtgaaatggcaggacctgtcggagaaggtggtctaccggcgcttcaccg

SEQ ID NO: 31796 - RNA, 73 nt, synthetic construct
  source 1..73: mol_type = other RNA
ttcccccaggtatacatgttcctggtgaaatggcaggacctgtcggagaaggtggtctaccggcgcttcaccg

SEQ ID NO: 31797 - RNA, 73 nt, synthetic construct
  source 1..73: mol_type = other RNA
ttcccccaggtgtacatgttcctggtgaaatggcaggacctgtcggagaaggtggtctaccggcgcttcaccg

SEQ ID NO: 31798 - RNA, 73 nt, synthetic construct
  source 1..73: mol_type = other RNA
ttcccccaggtgtacatgttcctggtgaaatggcaggacctgtcggagaaggtggtctaccggcgctttaccg

SEQ ID NO: 31799 - RNA, 73 nt, synthetic construct
  source 1..73: mol_type = other RNA
ttcccccaggtctacatgttcctggtgaaatggcaggacctgtcggagaaggtggtctaccggcgctttaccg

SEQ ID NO: 31800 - RNA, 74 nt, synthetic construct
  source 1..74: mol_type = other RNA
tttcccccaggtatacatgttcctggtgaaatggcaggacctgtcggagaaggtggtctaccggcgctttaccg

SEQ ID NO: 31801 - RNA, 74 nt, synthetic construct
  source 1..74: mol_type = other RNA
tttcccccaggtctacatgttcctggtgaaatggcaggacctgtcggagaaggtggtctaccggcgctttaccg

SEQ ID NO: 31802 - RNA, 74 nt, synthetic construct
  source 1..74: mol_type = other RNA
tttcccccaggtctacatgttcctggtgaaatggcaggacctgtcggagaaggtggtctaccggcgcttcaccg

SEQ ID NO: 31803 - RNA, 74 nt, synthetic construct
  source 1..74: mol_type = other RNA
tttcccccaggtttacatgttcctggtgaaatggcaggacctgtcggagaaggtggtctaccggcgcttcaccg

SEQ ID NO: 31804 - RNA, 74 nt, synthetic construct
  source 1..74: mol_type = other RNA
tttcccccaggtgtacatgttcctggtgaaatggcaggacctgtcggagaaggtggtctaccggcgctttaccg

SEQ ID NO: 31805 - RNA, 74 nt, synthetic construct
  source 1..74: mol_type = other RNA
tttcccccaggtttacatgttcctggtgaaatggcaggacctgtcggagaaggtggtctaccggcgctttaccg

SEQ ID NO: 31806 - RNA, 74 nt, synthetic construct
  source 1..74: mol_type = other RNA
tttcccccaggtatacatgttcctggtgaaatggcaggacctgtcggagaaggtggtctaccggcgcttcaccg

SEQ ID NO: 31807 - RNA, 74 nt, synthetic construct
  source 1..74: mol_type = other RNA
tttcccccaggtgtacatgttcctggtgaaatggcaggacctgtcggagaaggtggtctaccggcgcttcaccg

SEQ ID NO: 31808 - RNA, 75 nt, synthetic construct
  source 1..75: mol_type = other RNA
ctttcccccaggtgtacatgttcctggtgaaatggcaggacctgtcggagaaggtggtctaccggcgctttaccg

SEQ ID NO: 31809 - RNA, 75 nt, synthetic construct
  source 1..75: mol_type = other RNA
ctttcccccaggtgtacatgttcctggtgaaatggcaggacctgtcggagaaggtggtctaccggcgcttcaccg

SEQ ID NO: 31810 - RNA, 75 nt, synthetic construct
  source 1..75: mol_type = other RNA
ctttcccccaggtctacatgttcctggtgaaatggcaggacctgtcggagaaggtggtctaccggcgctttaccg

SEQ ID NO: 31811 - RNA, 75 nt, synthetic construct
  source 1..75: mol_type = other RNA
ctttcccccaggtctacatgttcctggtgaaatggcaggacctgtcggagaaggtggtctaccggcgcttcaccg

SEQ ID NO: 31812 - RNA, 75 nt, synthetic construct
  source 1..75: mol_type = other RNA
ctttcccccaggtatacatgttcctggtgaaatggcaggacctgtcggagaaggtggtctaccggcgcttcaccg

SEQ ID NO: 31813 - RNA, 75 nt, synthetic construct
  source 1..75: mol_type = other RNA
ctttcccccaggtttacatgttcctggtgaaatggcaggacctgtcggagaaggtggtctaccggcgcttcaccg

SEQ ID NO: 31814 - RNA, 75 nt, synthetic construct
  source 1..75: mol_type = other RNA
ctttcccccaggtatacatgttcctggtgaaatggcaggacctgtcggagaaggtggtctaccggcgctttaccg

SEQ ID NO: 31815 - RNA, 75 nt, synthetic construct
  source 1..75: mol_type = other RNA
ctttcccccaggtttacatgttcctggtgaaatggcaggacctgtcggagaaggtggtctaccggcgctttaccg

SEQ ID NO: 31816 - RNA, 76 nt, synthetic construct
  source 1..76: mol_type = other RNA
gctttcccccaggtctacatgttcctggtgaaatggcaggacctgtcggagaaggtggtctaccggcgcttcaccg

SEQ ID NO: 31817 - RNA, 76 nt, synthetic construct
  source 1..76: mol_type = other RNA
gctttcccccaggtctacatgttcctggtgaaatggcaggacctgtcggagaaggtggtctaccggcgctttaccg

SEQ ID NO: 31818 - RNA, 76 nt, synthetic construct
  source 1..76: mol_type = other RNA
gctttcccccaggtgtacatgttcctggtgaaatggcaggacctgtcggagaaggtggtctaccggcgcttcaccg

SEQ ID NO: 31819 - RNA, 76 nt, synthetic construct
  source 1..76: mol_type = other RNA
gctttcccccaggtttacatgttcctggtgaaatggcaggacctgtcggagaaggtggtctaccggcgcttcaccg

SEQ ID NO: 31820 - RNA, 76 nt, synthetic construct
  source 1..76: mol_type = other RNA
gctttcccccaggtatacatgttcctggtgaaatggcaggacctgtcggagaaggtggtctaccggcgctttaccg

SEQ ID NO: 31821 - RNA, 76 nt, synthetic construct
  source 1..76: mol_type = other RNA
gctttcccccaggtatacatgttcctggtgaaatggcaggacctgtcggagaaggtggtctaccggcgcttcaccg

SEQ ID NO: 31822 - RNA, 76 nt, synthetic construct
  source 1..76: mol_type = other RNA
gctttcccccaggtttacatgttcctggtgaaatggcaggacctgtcggagaaggtggtctaccggcgctttaccg

SEQ ID NO: 31823 - RNA, 76 nt, synthetic construct
  source 1..76: mol_type = other RNA
gctttcccccaggtgtacatgttcctggtgaaatggcaggacctgtcggagaaggtggtctaccggcgctttaccg

SEQ ID NO: 31824 - RNA, 77 nt, synthetic construct
  source 1..77: mol_type = other RNA
ggctttcccccaggtgtacatgttcctggtgaaatggcaggacctgtcggagaaggtggtctaccggcgctttaccg

SEQ ID NO: 31825 - RNA, 77 nt, synthetic construct
  source 1..77: mol_type = other RNA
ggctttcccccaggtgtacatgttcctggtgaaatggcaggacctgtcggagaaggtggtctaccggcgcttcaccg

SEQ ID NO: 31826 - RNA, 77 nt, synthetic construct
  source 1..77: mol_type = other RNA
ggctttcccccaggtctacatgttcctggtgaaatggcaggacctgtcggagaaggtggtctaccggcgctttaccg

SEQ ID NO: 31827 - RNA, 77 nt, synthetic construct
  source 1..77: mol_type = other RNA
ggctttcccccaggtctacatgttcctggtgaaatggcaggacctgtcggagaaggtggtctaccggcgcttcaccg

SEQ ID NO: 31828 - RNA, 77 nt, synthetic construct
  source 1..77: mol_type = other RNA
ggctttcccccaggtttacatgttcctggtgaaatggcaggacctgtcggagaaggtggtctaccggcgctttaccg

SEQ ID NO: 31829 - RNA, 77 nt, synthetic construct
  source 1..77: mol_type = other RNA
ggctttcccccaggtatacatgttcctggtgaaatggcaggacctgtcggagaaggtggtctaccggcgcttcaccg

SEQ ID NO: 31830 - RNA, 77 nt, synthetic construct
  source 1..77: mol_type = other RNA
ggctttcccccaggtatacatgttcctggtgaaatggcaggacctgtcggagaaggtggtctaccggcgctttaccg

SEQ ID NO: 31831 - RNA, 77 nt, synthetic construct
  source 1..77: mol_type = other RNA
ggctttcccccaggtttacatgttcctggtgaaatggcaggacctgtcggagaaggtggtctaccggcgcttcaccg

SEQ ID NO: 31832 - RNA, 78 nt, synthetic construct
  source 1..78: mol_type = other RNA
tggctttcccccaggtatacatgttcctggtgaaatggcaggacctgtcggagaaggtggtctaccggcgctttaccg

SEQ ID NO: 31833 - RNA, 78 nt, synthetic construct
  source 1..78: mol_type = other RNA
tggctttcccccaggtctacatgttcctggtgaaatggcaggacctgtcggagaaggtggtctaccggcgcttcaccg

SEQ ID NO: 31834 - RNA, 78 nt, synthetic construct
  source 1..78: mol_type = other RNA
tggctttcccccaggtgtacatgttcctggtgaaatggcaggacctgtcggagaaggtggtctaccggcgctttaccg

SEQ ID NO: 31835 - RNA, 78 nt, synthetic construct
  source 1..78: mol_type = other RNA
tggctttcccccaggtgtacatgttcctggtgaaatggcaggacctgtcggagaaggtggtctaccggcgcttcaccg

SEQ ID NO: 31836 - RNA, 78 nt, synthetic construct
  source 1..78: mol_type = other RNA
tggctttcccccaggtatacatgttcctggtgaaatggcaggacctgtcggagaaggtggtctaccggcgcttcaccg

SEQ ID NO: 31837 - RNA, 78 nt, synthetic construct
  source 1..78: mol_type = other RNA
tggctttcccccaggtttacatgttcctggtgaaatggcaggacctgtcggagaaggtggtctaccggcgctttaccg

SEQ ID NO: 31838 - RNA, 78 nt, synthetic construct
  source 1..78: mol_type = other RNA
tggctttcccccaggtctacatgttcctggtgaaatggcaggacctgtcggagaaggtggtctaccggcgctttaccg

SEQ ID NO: 31839 - RNA, 78 nt, synthetic construct
  source 1..78: mol_type = other RNA
tggctttcccccaggtttacatgttcctggtgaaatggcaggacctgtcggagaaggtggtctaccggcgcttcaccg

SEQ ID NO: 31840 - RNA, 79 nt, synthetic construct
  source 1..79: mol_type = other RNA
ctggctttcccccaggtttacatgttcctggtgaaatggcaggacctgtcggagaaggtggtctaccggcgcttcaccg

SEQ ID NO: 31841 - RNA, 79 nt, synthetic construct
  source 1..79: mol_type = other RNA
ctggctttcccccaggtgtacatgttcctggtgaaatggcaggacctgtcggagaaggtggtctaccggcgctttaccg

SEQ ID NO: 31842 - RNA, 79 nt, synthetic construct
  source 1..79: mol_type = other RNA
ctggctttcccccaggtgtacatgttcctggtgaaatggcaggacctgtcggagaaggtggtctaccggcgcttcaccg

SEQ ID NO: 31843 - RNA, 79 nt, synthetic construct
  source 1..79: mol_type = other RNA
ctggctttcccccaggtttacatgttcctggtgaaatggcaggacctgtcggagaaggtggtctaccggcgctttaccg

SEQ ID NO: 31844 - RNA, 79 nt, synthetic construct
  source 1..79: mol_type = other RNA
ctggctttcccccaggtctacatgttcctggtgaaatggcaggacctgtcggagaaggtggtctaccggcgcttcaccg

SEQ ID NO: 31845 - RNA, 79 nt, synthetic construct
  source 1..79: mol_type = other RNA
ctggctttcccccaggtatacatgttcctggtgaaatggcaggacctgtcggagaaggtggtctaccggcgcttcaccg

SEQ ID NO: 31846 - RNA, 79 nt, synthetic construct
  source 1..79: mol_type = other RNA
ctggctttcccccaggtctacatgttcctggtgaaatggcaggacctgtcggagaaggtggtctaccggcgctttaccg

SEQ ID NO: 31847 - RNA, 79 nt, synthetic construct
  source 1..79: mol_type = other RNA
ctggctttcccccaggtatacatgttcctggtgaaatggcaggacctgtcggagaaggtggtctaccggcgctttaccg

SEQ ID NO: 31848 - RNA, 80 nt, synthetic construct
  source 1..80: mol_type = other RNA
tctggctttcccccaggtctacatgttcctggtgaaatggcaggacctgtcggagaaggtggtctaccggcgctttaccg

SEQ ID NO: 31849 - RNA, 80 nt, synthetic construct
  source 1..80: mol_type = other RNA
tctggctttcccccaggtatacatgttcctggtgaaatggcaggacctgtcggagaaggtggtctaccggcgcttcaccg

SEQ ID NO: 31850 - RNA, 80 nt, synthetic construct
  source 1..80: mol_type = other RNA
tctggctttcccccaggtatacatgttcctggtgaaatggcaggacctgtcggagaaggtggtctaccggcgctttaccg

SEQ ID NO: 31851 - RNA, 80 nt, synthetic construct
  source 1..80: mol_type = other RNA
tctggctttcccccaggtctacatgttcctggtgaaatggcaggacctgtcggagaaggtggtctaccggcgcttcaccg

SEQ ID NO: 31852 - RNA, 80 nt, synthetic construct
  source 1..80: mol_type = other RNA
tctggctttcccccaggtttacatgttcctggtgaaatggcaggacctgtcggagaaggtggtctaccggcgcttcaccg

SEQ ID NO: 31853 - RNA, 80 nt, synthetic construct
  source 1..80: mol_type = other RNA
tctggctttcccccaggtgtacatgttcctggtgaaatggcaggacctgtcggagaaggtggtctaccggcgctttaccg

SEQ ID NO: 31854 - RNA, 80 nt, synthetic construct
  source 1..80: mol_type = other RNA
tctggctttcccccaggtgtacatgttcctggtgaaatggcaggacctgtcggagaaggtggtctaccggcgcttcaccg

SEQ ID NO: 31855 - RNA, 80 nt, synthetic construct
  source 1..80: mol_type = other RNA
tctggctttcccccaggtttacatgttcctggtgaaatggcaggacctgtcggagaaggtggtctaccggcgctttaccg

SEQ ID NO: 31856 - RNA, 81 nt, synthetic construct
  source 1..81: mol_type = other RNA
ctctggctttcccccaggtgtacatgttcctggtgaaatggcaggacctgtcggagaaggtggtctaccggcgctttaccg

SEQ ID NO: 31857 - RNA, 81 nt, synthetic construct
  source 1..81: mol_type = other RNA
ctctggctttcccccaggtctacatgttcctggtgaaatggcaggacctgtcggagaaggtggtctaccggcgctttaccg

SEQ ID NO: 31858 - RNA, 81 nt, synthetic construct
  source 1..81: mol_type = other RNA
ctctggctttcccccaggtctacatgttcctggtgaaatggcaggacctgtcggagaaggtggtctaccggcgcttcaccg

SEQ ID NO: 31859 - RNA, 81 nt, synthetic construct
  source 1..81: mol_type = other RNA
ctctggctttcccccaggtatacatgttcctggtgaaatggcaggacctgtcggagaaggtggtctaccggcgctttaccg

SEQ ID NO: 31860 - RNA, 81 nt, synthetic construct
  source 1..81: mol_type = other RNA
ctctggctttcccccaggtatacatgttcctggtgaaatggcaggacctgtcggagaaggtggtctaccggcgcttcaccg

SEQ ID NO: 31861 - RNA, 81 nt, synthetic construct
  source 1..81: mol_type = other RNA
ctctggctttcccccaggtttacatgttcctggtgaaatggcaggacctgtcggagaaggtggtctaccggcgcttcaccg

SEQ ID NO: 31862 - RNA, 81 nt, synthetic construct
  source 1..81: mol_type = other RNA
ctctggctttcccccaggtttacatgttcctggtgaaatggcaggacctgtcggagaaggtggtctaccggcgctttaccg

SEQ ID NO: 31863 - RNA, 81 nt, synthetic construct
  source 1..81: mol_type = other RNA
ctctggctttcccccaggtgtacatgttcctggtgaaatggcaggacctgtcggagaaggtggtctaccggcgcttcaccg

SEQ ID NO: 31864 - RNA, 82 nt, synthetic construct
  source 1..82: mol_type = other RNA
actctggctttcccccaggtctacatgttcctggtgaaatggcaggacctgtcggagaaggtggtctaccggcgcttcaccg

SEQ ID NO: 31865 - RNA, 82 nt, synthetic construct
  source 1..82: mol_type = other RNA
actctggctttcccccaggtttacatgttcctggtgaaatggcaggacctgtcggagaaggtggtctaccggcgctttaccg

SEQ ID NO: 31866 - RNA, 82 nt, synthetic construct
  source 1..82: mol_type = other RNA
actctggctttcccccaggtttacatgttcctggtgaaatggcaggacctgtcggagaaggtggtctaccggcgcttcaccg

SEQ ID NO: 31867 - RNA, 82 nt, synthetic construct
  source 1..82: mol_type = other RNA
actctggctttcccccaggtatacatgttcctggtgaaatggcaggacctgtcggagaaggtggtctaccggcgcttcaccg

SEQ ID NO: 31868 - RNA, 82 nt, synthetic construct
  source 1..82: mol_type = other RNA
actctggctttcccccaggtgtacatgttcctggtgaaatggcaggacctgtcggagaaggtggtctaccggcgcttcaccg

SEQ ID NO: 31869 - RNA, 82 nt, synthetic construct
  source 1..82: mol_type = other RNA
actctggctttcccccaggtatacatgttcctggtgaaatggcaggacctgtcggagaaggtggtctaccggcgctttaccg

SEQ ID NO: 31870 - RNA, 82 nt, synthetic construct
  source 1..82: mol_type = other RNA
actctggctttcccccaggtctacatgttcctggtgaaatggcaggacctgtcggagaaggtggtctaccggcgctttaccg

SEQ ID NO: 31871 - RNA, 82 nt, synthetic construct
  source 1..82: mol_type = other RNA
actctggctttcccccaggtgtacatgttcctggtgaaatggcaggacctgtcggagaaggtggtctaccggcgctttaccg

SEQ ID NO: 31872 - RNA, 83 nt, synthetic construct
  source 1..83: mol_type = other RNA
gactctggctttcccccaggtttacatgttcctggtgaaatggcaggacctgtcggagaaggtggtctaccggcgctttaccg

SEQ ID NO: 31873 - RNA, 83 nt, synthetic construct
  source 1..83: mol_type = other RNA
gactctggctttcccccaggtgtacatgttcctggtgaaatggcaggacctgtcggagaaggtggtctaccggcgctttaccg

SEQ ID NO: 31874 - RNA, 83 nt, synthetic construct
  source 1..83: mol_type = other RNA
gactctggctttcccccaggtttacatgttcctggtgaaatggcaggacctgtcggagaaggtggtctaccggcgcttcaccg

SEQ ID NO: 31875 - RNA, 83 nt, synthetic construct
  source 1..83: mol_type = other RNA
gactctggctttcccccaggtgtacatgttcctggtgaaatggcaggacctgtcggagaaggtggtctaccggcgcttcaccg

SEQ ID NO: 31876 - RNA, 83 nt, synthetic construct
  source 1..83: mol_type = other RNA
gactctggctttcccccaggtatacatgttcctggtgaaatggcaggacctgtcggagaaggtggtctaccggcgctttaccg

SEQ ID NO: 31877 - RNA, 83 nt, synthetic construct
  source 1..83: mol_type = other RNA
gactctggctttcccccaggtatacatgttcctggtgaaatggcaggacctgtcggagaaggtggtctaccggcgcttcaccg

SEQ ID NO: 31878 - RNA, 83 nt, synthetic construct
  source 1..83: mol_type = other RNA
gactctggctttcccccaggtctacatgttcctggtgaaatggcaggacctgtcggagaaggtggtctaccggcgcttcaccg

SEQ ID NO: 31879 - RNA, 83 nt, synthetic construct
  source 1..83: mol_type = other RNA
gactctggctttcccccaggtctacatgttcctggtgaaatggcaggacctgtcggagaaggtggtctaccggcgctttaccg

SEQ ID NO: 31880 - RNA, 84 nt, synthetic construct
  source 1..84: mol_type = other RNA
cgactctggctttcccccaggtttacatgttcctggtgaaatggcaggacctgtcggagaaggtggtctaccggcgcttcaccg

SEQ ID NO: 31881 - RNA, 84 nt, synthetic construct
  source 1..84: mol_type = other RNA
cgactctggctttcccccaggtgtacatgttcctggtgaaatggcaggacctgtcggagaaggtggtctaccggcgctttaccg

SEQ ID NO: 31882 - RNA, 84 nt, synthetic construct
  source 1..84: mol_type = other RNA
cgactctggctttcccccaggtgtacatgttcctggtgaaatggcaggacctgtcggagaaggtggtctaccggcgcttcaccg

SEQ ID NO: 31883 - RNA, 84 nt, synthetic construct
  source 1..84: mol_type = other RNA
cgactctggctttcccccaggtctacatgttcctggtgaaatggcaggacctgtcggagaaggtggtctaccggcgctttaccg

SEQ ID NO: 31884 - RNA, 84 nt, synthetic construct
  source 1..84: mol_type = other RNA
cgactctggctttcccccaggtctacatgttcctggtgaaatggcaggacctgtcggagaaggtggtctaccggcgcttcaccg

SEQ ID NO: 31885 - RNA, 84 nt, synthetic construct
  source 1..84: mol_type = other RNA
cgactctggctttcccccaggtatacatgttcctggtgaaatggcaggacctgtcggagaaggtggtctaccggcgctttaccg

SEQ ID NO: 31886 - RNA, 84 nt, synthetic construct
  source 1..84: mol_type = other RNA
cgactctggctttcccccaggtatacatgttcctggtgaaatggcaggacctgtcggagaaggtggtctaccggcgcttcaccg

SEQ ID NO: 31887 - RNA, 84 nt, synthetic construct
  source 1..84: mol_type = other RNA
cgactctggctttcccccaggtttacatgttcctggtgaaatggcaggacctgtcggagaaggtggtctaccggcgctttaccg

SEQ ID NO: 31888 - RNA, 85 nt, synthetic construct
  source 1..85: mol_type = other RNA
ccgactctggctttcccccaggtatacatgttcctggtgaaatggcaggacctgtcggagaaggtggtctaccggcgcttcaccg

SEQ ID NO: 31889 - RNA, 85 nt, synthetic construct
  source 1..85: mol_type = other RNA
ccgactctggctttcccccaggtgtacatgttcctggtgaaatggcaggacctgtcggagaaggtggtctaccggcgctttaccg

SEQ ID NO: 31890 - RNA, 85 nt, synthetic construct
  source 1..85: mol_type = other RNA
ccgactctggctttcccccaggtatacatgttcctggtgaaatggcaggacctgtcggagaaggtggtctaccggcgctttaccg

SEQ ID NO: 31891 - RNA, 85 nt, synthetic construct
  source 1..85: mol_type = other RNA
ccgactctggctttcccccaggtttacatgttcctggtgaaatggcaggacctgtcggagaaggtggtctaccggcgcttcaccg

SEQ ID NO: 31892 - RNA, 85 nt, synthetic construct
  source 1..85: mol_type = other RNA
ccgactctggctttcccccaggtgtacatgttcctggtgaaatggcaggacctgtcggagaaggtggtctaccggcgcttcaccg

SEQ ID NO: 31893 - RNA, 85 nt, synthetic construct
  source 1..85: mol_type = other RNA
ccgactctggctttcccccaggtctacatgttcctggtgaaatggcaggacctgtcggagaaggtggtctaccggcgctttaccg

SEQ ID NO: 31894 - RNA, 85 nt, synthetic construct
  source 1..85: mol_type = other RNA
ccgactctggctttcccccaggtctacatgttcctggtgaaatggcaggacctgtcggagaaggtggtctaccggcgcttcaccg

SEQ ID NO: 31895 - RNA, 85 nt, synthetic construct
  source 1..85: mol_type = other RNA
ccgactctggctttcccccaggtttacatgttcctggtgaaatggcaggacctgtcggagaaggtggtctaccggcgctttaccg

SEQ ID NO: 31896 - RNA, 86 nt, synthetic construct
  source 1..86: mol_type = other RNA
cccgactctggctttcccccaggtctacatgttcctggtgaaatggcaggacctgtcggagaaggtggtctaccggcgctttaccg

SEQ ID NO: 31897 - RNA, 86 nt, synthetic construct
  source 1..86: mol_type = other RNA
cccgactctggctttcccccaggtatacatgttcctggtgaaatggcaggacctgtcggagaaggtggtctaccggcgcttcaccg

SEQ ID NO: 31898 - RNA, 86 nt, synthetic construct
  source 1..86: mol_type = other RNA
cccgactctggctttcccccaggtatacatgttcctggtgaaatggcaggacctgtcggagaaggtggtctaccggcgctttaccg

SEQ ID NO: 31899 - RNA, 86 nt, synthetic construct
  source 1..86: mol_type = other RNA
cccgactctggctttcccccaggtctacatgttcctggtgaaatggcaggacctgtcggagaaggtggtctaccggcgcttcaccg

SEQ ID NO: 31900 - RNA, 86 nt, synthetic construct
  source 1..86: mol_type = other RNA
cccgactctggctttcccccaggtgtacatgttcctggtgaaatggcaggacctgtcggagaaggtggtctaccggcgcttcaccg

SEQ ID NO: 31901 - RNA, 86 nt, synthetic construct
  source 1..86: mol_type = other RNA
cccgactctggctttcccccaggtgtacatgttcctggtgaaatggcaggacctgtcggagaaggtggtctaccggcgctttaccg

SEQ ID NO: 31902 - RNA, 86 nt, synthetic construct
  source 1..86: mol_type = other RNA
cccgactctggctttcccccaggtttacatgttcctggtgaaatggcaggacctgtcggagaaggtggtctaccggcgctttaccg

SEQ ID NO: 31903 - RNA, 86 nt, synthetic construct
  source 1..86: mol_type = other RNA
cccgactctggctttcccccaggtttacatgttcctggtgaaatggcaggacctgtcggagaaggtggtctaccggcgcttcaccg

SEQ ID NO: 31904 - RNA, 87 nt, synthetic construct
  source 1..87: mol_type = other RNA
ccccgactctggctttcccccaggtctacatgttcctggtgaaatggcaggacctgtcggagaaggtggtctaccggcgctttaccg

SEQ ID NO: 31905 - RNA, 87 nt, synthetic construct
  source 1..87: mol_type = other RNA
ccccgactctggctttcccccaggtctacatgttcctggtgaaatggcaggacctgtcggagaaggtggtctaccggcgcttcaccg

SEQ ID NO: 31906 - RNA, 87 nt, synthetic construct
  source 1..87: mol_type = other RNA
ccccgactctggctttcccccaggtatacatgttcctggtgaaatggcaggacctgtcggagaaggtggtctaccggcgctttaccg

SEQ ID NO: 31907 - RNA, 87 nt, synthetic construct
  source 1..87: mol_type = other RNA
ccccgactctggctttcccccaggtgtacatgttcctggtgaaatggcaggacctgtcggagaaggtggtctaccggcgcttcaccg

SEQ ID NO: 31908 - RNA, 87 nt, synthetic construct
  source 1..87: mol_type = other RNA
ccccgactctggctttcccccaggtttacatgttcctggtgaaatggcaggacctgtcggagaaggtggtctaccggcgcttcaccg

SEQ ID NO: 31909 - RNA, 87 nt, synthetic construct
  source 1..87: mol_type = other RNA
ccccgactctggctttcccccaggtttacatgttcctggtgaaatggcaggacctgtcggagaaggtggtctaccggcgctttaccg

SEQ ID NO: 31910 - RNA, 87 nt, synthetic construct
  source 1..87: mol_type = other RNA
ccccgactctggctttcccccaggtgtacatgttcctggtgaaatggcaggacctgtcggagaaggtggtctaccggcgctttaccg

SEQ ID NO: 31911 - RNA, 87 nt, synthetic construct
  source 1..87: mol_type = other RNA
ccccgactctggctttcccccaggtatacatgttcctggtgaaatggcaggacctgtcggagaaggtggtctaccggcgcttcaccg

SEQ ID NO: 31912 - RNA, 88 nt, synthetic construct
  source 1..88: mol_type = other RNA
cccccgactctggctttcccccaggtttacatgttcctggtgaaatggcaggacctgtcggagaaggtggtctaccggcgcttcaccg

SEQ ID NO: 31913 - RNA, 88 nt, synthetic construct
  source 1..88: mol_type = other RNA
cccccgactctggctttcccccaggtttacatgttcctggtgaaatggcaggacctgtcggagaaggtggtctaccggcgctttaccg

SEQ ID NO: 31914 - RNA, 88 nt, synthetic construct
  source 1..88: mol_type = other RNA
cccccgactctggctttcccccaggtctacatgttcctggtgaaatggcaggacctgtcggagaaggtggtctaccggcgctttaccg

SEQ ID NO: 31915 - RNA, 88 nt, synthetic construct
  source 1..88: mol_type = other RNA
cccccgactctggctttcccccaggtatacatgttcctggtgaaatggcaggacctgtcggagaaggtggtctaccggcgcttcaccg

SEQ ID NO: 31916 - RNA, 88 nt, synthetic construct
  source 1..88: mol_type = other RNA
cccccgactctggctttcccccaggtctacatgttcctggtgaaatggcaggacctgtcggagaaggtggtctaccggcgcttcaccg

SEQ ID NO: 31917 - RNA, 88 nt, synthetic construct
  source 1..88: mol_type = other RNA
cccccgactctggctttcccccaggtgtacatgttcctggtgaaatggcaggacctgtcggagaaggtggtctaccggcgcttcaccg

SEQ ID NO: 31918 - RNA, 88 nt, synthetic construct
  source 1..88: mol_type = other RNA
cccccgactctggctttcccccaggtgtacatgttcctggtgaaatggcaggacctgtcggagaaggtggtctaccggcgctttaccg

SEQ ID NO: 31919 - RNA, 88 nt, synthetic construct
  source 1..88: mol_type = other RNA
cccccgactctggctttcccccaggtatacatgttcctggtgaaatggcaggacctgtcggagaaggtggtctaccggcgctttaccg

SEQ ID NO: 31920 - RNA, 89 nt, synthetic construct
  source 1..89: mol_type = other RNA
tcccccgactctggctttcccccaggtctacatgttcctggtgaaatggcaggacctgtcggagaaggtggtctaccggcgctttaccg

SEQ ID NO: 31921 - RNA, 89 nt, synthetic construct
  source 1..89: mol_type = other RNA
tcccccgactctggctttcccccaggtatacatgttcctggtgaaatggcaggacctgtcggagaaggtggtctaccggcgcttcaccg

SEQ ID NO: 31922 - RNA, 89 nt, synthetic construct
  source 1..89: mol_type = other RNA
tcccccgactctggctttcccccaggtatacatgttcctggtgaaatggcaggacctgtcggagaaggtggtctaccggcgctttaccg

SEQ ID NO: 31923 - RNA, 89 nt, synthetic construct
  source 1..89: mol_type = other RNA
tcccccgactctggctttcccccaggtgtacatgttcctggtgaaatggcaggacctgtcggagaaggtggtctaccggcgcttcaccg

SEQ ID NO: 31924 - RNA, 89 nt, synthetic construct
  source 1..89: mol_type = other RNA
tcccccgactctggctttcccccaggtttacatgttcctggtgaaatggcaggacctgtcggagaaggtggtctaccggcgctttaccg

SEQ ID NO: 31925 - RNA, 89 nt, synthetic construct
  source 1..89: mol_type = other RNA
tcccccgactctggctttcccccaggtgtacatgttcctggtgaaatggcaggacctgtcggagaaggtggtctaccggcgctttaccg

SEQ ID NO: 31926 - RNA, 89 nt, synthetic construct
  source 1..89: mol_type = other RNA
tcccccgactctggctttcccccaggtctacatgttcctggtgaaatggcaggacctgtcggagaaggtggtctaccggcgcttcaccg

SEQ ID NO: 31927 - RNA, 89 nt, synthetic construct
  source 1..89: mol_type = other RNA
tcccccgactctggctttcccccaggtttacatgttcctggtgaaatggcaggacctgtcggagaaggtggtctaccggcgcttcaccg

SEQ ID NO: 31928 - RNA, 90 nt, synthetic construct
  source 1..90: mol_type = other RNA
gtcccccgactctggctttcccccaggtgtacatgttcctggtgaaatggcaggacctgtcggagaaggtggtctaccggcgctttaccg

SEQ ID NO: 31929 - RNA, 90 nt, synthetic construct
  source 1..90: mol_type = other RNA
gtcccccgactctggctttcccccaggtctacatgttcctggtgaaatggcaggacctgtcggagaaggtggtctaccggcgcttcaccg

SEQ ID NO: 31930 - RNA, 90 nt, synthetic construct
  source 1..90: mol_type = other RNA
gtcccccgactctggctttcccccaggtatacatgttcctggtgaaatggcaggacctgtcggagaaggtggtctaccggcgcttcaccg

SEQ ID NO: 31931 - RNA, 90 nt, synthetic construct
  source 1..90: mol_type = other RNA
gtcccccgactctggctttcccccaggtatacatgttcctggtgaaatggcaggacctgtcggagaaggtggtctaccggcgctttaccg

SEQ ID NO: 31932 - RNA, 90 nt, synthetic construct
  source 1..90: mol_type = other RNA
gtcccccgactctggctttcccccaggtctacatgttcctggtgaaatggcaggacctgtcggagaaggtggtctaccggcgctttaccg

SEQ ID NO: 31933 - RNA, 90 nt, synthetic construct
  source 1..90: mol_type = other RNA
gtcccccgactctggctttcccccaggtgtacatgttcctggtgaaatggcaggacctgtcggagaaggtggtctaccggcgcttcaccg

SEQ ID NO: 31934 - RNA, 90 nt, synthetic construct
  source 1..90: mol_type = other RNA
gtcccccgactctggctttcccccaggtttacatgttcctggtgaaatggcaggacctgtcggagaaggtggtctaccggcgcttcaccg

SEQ ID NO: 31935 - RNA, 90 nt, synthetic construct
  source 1..90: mol_type = other RNA
gtcccccgactctggctttcccccaggtttacatgttcctggtgaaatggcaggacctgtcggagaaggtggtctaccggcgctttaccg

SEQ ID NO: 31936 - RNA, 91 nt, synthetic construct
  source 1..91: mol_type = other RNA
ggtcccccgactctggctttcccccaggtttacatgttcctggtgaaatggcaggacctgtcggagaaggtggtctaccggcgctttaccg

SEQ ID NO: 31937 - RNA, 91 nt, synthetic construct
  source 1..91: mol_type = other RNA
ggtcccccgactctggctttcccccaggtgtacatgttcctggtgaaatggcaggacctgtcggagaaggtggtctaccggcgcttcaccg

SEQ ID NO: 31938 - RNA, 91 nt, synthetic construct
  source 1..91: mol_type = other RNA
ggtcccccgactctggctttcccccaggtatacatgttcctggtgaaatggcaggacctgtcggagaaggtggtctaccggcgcttcaccg

SEQ ID NO: 31939 - RNA, 91 nt, synthetic construct
  source 1..91: mol_type = other RNA
ggtcccccgactctggctttcccccaggtttacatgttcctggtgaaatggcaggacctgtcggagaaggtggtctaccggcgcttcaccg

SEQ ID NO: 31940 - RNA, 91 nt, synthetic construct
  source 1..91: mol_type = other RNA
ggtcccccgactctggctttcccccaggtctacatgttcctggtgaaatggcaggacctgtcggagaaggtggtctaccggcgcttcaccg

SEQ ID NO: 31941 - RNA, 91 nt, synthetic construct
  source 1..91: mol_type = other RNA
ggtcccccgactctggctttcccccaggtctacatgttcctggtgaaatggcaggacctgtcggagaaggtggtctaccggcgctttaccg

SEQ ID NO: 31942 - RNA, 91 nt, synthetic construct
  source 1..91: mol_type = other RNA
ggtcccccgactctggctttcccccaggtgtacatgttcctggtgaaatggcaggacctgtcggagaaggtggtctaccggcgctttaccg

SEQ ID NO: 31943 - RNA, 91 nt, synthetic construct
  source 1..91: mol_type = other RNA
ggtcccccgactctggctttcccccaggtatacatgttcctggtgaaatggcaggacctgtcggagaaggtggtctaccggcgctttaccg

SEQ ID NO: 31944 - RNA, 92 nt, synthetic construct
  source 1..92: mol_type = other RNA
gggtcccccgactctggctttcccccaggtgtacatgttcctggtgaaatggcaggacctgtcggagaaggtggtctaccggcgctttaccg

SEQ ID NO: 31945 - RNA, 92 nt, synthetic construct
  source 1..92: mol_type = other RNA
gggtcccccgactctggctttcccccaggtctacatgttcctggtgaaatggcaggacctgtcggagaaggtggtctaccggcgctttaccg

SEQ ID NO: 31946 - RNA, 92 nt, synthetic construct
  source 1..92: mol_type = other RNA
gggtcccccgactctggctttcccccaggtttacatgttcctggtgaaatggcaggacctgtcggagaaggtggtctaccggcgcttcaccg

SEQ ID NO: 31947 - RNA, 92 nt, synthetic construct
  source 1..92: mol_type = other RNA
gggtcccccgactctggctttcccccaggtttacatgttcctggtgaaatggcaggacctgtcggagaaggtggtctaccggcgctttaccg

SEQ ID NO: 31948 - RNA, 92 nt, synthetic construct
  source 1..92: mol_type = other RNA
gggtcccccgactctggctttcccccaggtatacatgttcctggtgaaatggcaggacctgtcggagaaggtggtctaccggcgcttcaccg

SEQ ID NO: 31949 - RNA, 92 nt, synthetic construct
  source 1..92: mol_type = other RNA
gggtcccccgactctggctttcccccaggtatacatgttcctggtgaaatggcaggacctgtcggagaaggtggtctaccggcgctttaccg

SEQ ID NO: 31950 - RNA, 92 nt, synthetic construct
  source 1..92: mol_type = other RNA
gggtcccccgactctggctttcccccaggtctacatgttcctggtgaaatggcaggacctgtcggagaaggtggtctaccggcgcttcaccg

SEQ ID NO: 31951 - RNA, 92 nt, synthetic construct
  source 1..92: mol_type = other RNA
gggtcccccgactctggctttcccccaggtgtacatgttcctggtgaaatggcaggacctgtcggagaaggtggtctaccggcgcttcaccg

SEQ ID NO: 31952 - RNA, 93 nt, synthetic construct
  source 1..93: mol_type = other RNA
ggggtcccccgactctggctttcccccaggtttacatgttcctggtgaaatggcaggacctgtcggagaaggtggtctaccggcgctttaccg

SEQ ID NO: 31953 - RNA, 93 nt, synthetic construct
  source 1..93: mol_type = other RNA
ggggtcccccgactctggctttcccccaggtatacatgttcctggtgaaatggcaggacctgtcggagaaggtggtctaccggcgcttcaccg

SEQ ID NO: 31954 - RNA, 93 nt, synthetic construct
  source 1..93: mol_type = other RNA
ggggtcccccgactctggctttcccccaggtatacatgttcctggtgaaatggcaggacctgtcggagaaggtggtctaccggcgctttaccg

SEQ ID NO: 31955 - RNA, 93 nt, synthetic construct
  source 1..93: mol_type = other RNA
ggggtcccccgactctggctttcccccaggtgtacatgttcctggtgaaatggcaggacctgtcggagaaggtggtctaccggcgcttcaccg

SEQ ID NO: 31956 - RNA, 93 nt, synthetic construct
  source 1..93: mol_type = other RNA
ggggtcccccgactctggctttcccccaggtttacatgttcctggtgaaatggcaggacctgtcggagaaggtggtctaccggcgcttcaccg

SEQ ID NO: 31957 - RNA, 93 nt, synthetic construct
  source 1..93: mol_type = other RNA
ggggtcccccgactctggctttcccccaggtgtacatgttcctggtgaaatggcaggacctgtcggagaaggtggtctaccggcgctttaccg

SEQ ID NO: 31958 - RNA, 93 nt, synthetic construct
  source 1..93: mol_type = other RNA
ggggtcccccgactctggctttcccccaggtctacatgttcctggtgaaatggcaggacctgtcggagaaggtggtctaccggcgctttaccg

SEQ ID NO: 31959 - RNA, 93 nt, synthetic construct
  source 1..93: mol_type = other RNA
ggggtcccccgactctggctttcccccaggtctacatgttcctggtgaaatggcaggacctgtcggagaaggtggtctaccggcgcttcaccg

SEQ ID NO: 31960 - RNA, 94 nt, synthetic construct
  source 1..94: mol_type = other RNA
tggggtcccccgactctggctttcccccaggtgtacatgttcctggtgaaatggcaggacctgtcggagaaggtggtctaccggcgcttcaccg

SEQ ID NO: 31961 - RNA, 94 nt, synthetic construct
  source 1..94: mol_type = other RNA
tggggtcccccgactctggctttcccccaggtatacatgttcctggtgaaatggcaggacctgtcggagaaggtggtctaccggcgcttcaccg

SEQ ID NO: 31962 - RNA, 94 nt, synthetic construct
  source 1..94: mol_type = other RNA
tggggtcccccgactctggctttcccccaggtatacatgttcctggtgaaatggcaggacctgtcggagaaggtggtctaccggcgctttaccg

SEQ ID NO: 31963 - RNA, 94 nt, synthetic construct
  source 1..94: mol_type = other RNA
tggggtcccccgactctggctttcccccaggtctacatgttcctggtgaaatggcaggacctgtcggagaaggtggtctaccggcgctttaccg

SEQ ID NO: 31964 - RNA, 94 nt, synthetic construct
  source 1..94: mol_type = other RNA
tggggtcccccgactctggctttcccccaggtgtacatgttcctggtgaaatggcaggacctgtcggagaaggtggtctaccggcgctttaccg

SEQ ID NO: 31965 - RNA, 94 nt, synthetic construct
  source 1..94: mol_type = other RNA
tggggtcccccgactctggctttcccccaggtttacatgttcctggtgaaatggcaggacctgtcggagaaggtggtctaccggcgctttaccg

SEQ ID NO: 31966 - RNA, 94 nt, synthetic construct
  source 1..94: mol_type = other RNA
tggggtcccccgactctggctttcccccaggtttacatgttcctggtgaaatggcaggacctgtcggagaaggtggtctaccggcgcttcaccg

SEQ ID NO: 31967 - RNA, 94 nt, synthetic construct
  source 1..94: mol_type = other RNA
tggggtcccccgactctggctttcccccaggtctacatgttcctggtgaaatggcaggacctgtcggagaaggtggtctaccggcgcttcaccg

SEQ ID NO: 31968 - RNA, 95 nt, synthetic construct
  source 1..95: mol_type = other RNA
atggggtcccccgactctggctttcccccaggtatacatgttcctggtgaaatggcaggacctgtcggagaaggtggtctaccggcgcttcaccg

SEQ ID NO: 31969 - RNA, 95 nt, synthetic construct
  source 1..95: mol_type = other RNA
atggggtcccccgactctggctttcccccaggtttacatgttcctggtgaaatggcaggacctgtcggagaaggtggtctaccggcgcttcaccg

SEQ ID NO: 31970 - RNA, 95 nt, synthetic construct
  source 1..95: mol_type = other RNA
atggggtcccccgactctggctttcccccaggtttacatgttcctggtgaaatggcaggacctgtcggagaaggtggtctaccggcgctttaccg

SEQ ID NO: 31971 - RNA, 95 nt, synthetic construct
  source 1..95: mol_type = other RNA
atggggtcccccgactctggctttcccccaggtgtacatgttcctggtgaaatggcaggacctgtcggagaaggtggtctaccggcgctttaccg

SEQ ID NO: 31972 - RNA, 95 nt, synthetic construct
  source 1..95: mol_type = other RNA
atggggtcccccgactctggctttcccccaggtgtacatgttcctggtgaaatggcaggacctgtcggagaaggtggtctaccggcgcttcaccg

SEQ ID NO: 31973 - RNA, 95 nt, synthetic construct
  source 1..95: mol_type = other RNA
atggggtcccccgactctggctttcccccaggtctacatgttcctggtgaaatggcaggacctgtcggagaaggtggtctaccggcgctttaccg

SEQ ID NO: 31974 - RNA, 95 nt, synthetic construct
  source 1..95: mol_type = other RNA
atggggtcccccgactctggctttcccccaggtctacatgttcctggtgaaatggcaggacctgtcggagaaggtggtctaccggcgcttcaccg

SEQ ID NO: 31975 - RNA, 95 nt, synthetic construct
  source 1..95: mol_type = other RNA
atggggtcccccgactctggctttcccccaggtatacatgttcctggtgaaatggcaggacctgtcggagaaggtggtctaccggcgctttaccg

SEQ ID NO: 31976 - RNA, 96 nt, synthetic construct
  source 1..96: mol_type = other RNA
aatggggtcccccgactctggctttcccccaggtctacatgttcctggtgaaatggcaggacctgtcggagaaggtggtctaccggcgcttcaccg

SEQ ID NO: 31977 - RNA, 96 nt, synthetic construct
  source 1..96: mol_type = other RNA
aatggggtcccccgactctggctttcccccaggtctacatgttcctggtgaaatggcaggacctgtcggagaaggtggtctaccggcgctttaccg

SEQ ID NO: 31978 - RNA, 96 nt, synthetic construct
  source 1..96: mol_type = other RNA
aatggggtcccccgactctggctttcccccaggtatacatgttcctggtgaaatggcaggacctgtcggagaaggtggtctaccggcgcttcaccg

SEQ ID NO: 31979 - RNA, 96 nt, synthetic construct
  source 1..96: mol_type = other RNA
aatggggtcccccgactctggctttcccccaggtatacatgttcctggtgaaatggcaggacctgtcggagaaggtggtctaccggcgctttaccg

SEQ ID NO: 31980 - RNA, 96 nt, synthetic construct
  source 1..96: mol_type = other RNA
aatggggtcccccgactctggctttcccccaggtttacatgttcctggtgaaatggcaggacctgtcggagaaggtggtctaccggcgctttaccg

SEQ ID NO: 31981 - RNA, 96 nt, synthetic construct
  source 1..96: mol_type = other RNA
aatggggtcccccgactctggctttcccccaggtgtacatgttcctggtgaaatggcaggacctgtcggagaaggtggtctaccggcgctttaccg

SEQ ID NO: 31982 - RNA, 96 nt, synthetic construct
  source 1..96: mol_type = other RNA
aatggggtcccccgactctggctttcccccaggtttacatgttcctggtgaaatggcaggacctgtcggagaaggtggtctaccggcgcttcaccg

SEQ ID NO: 31983 - RNA, 96 nt, synthetic construct
  source 1..96: mol_type = other RNA
aatggggtcccccgactctggctttcccccaggtgtacatgttcctggtgaaatggcaggacctgtcggagaaggtggtctaccggcgcttcaccg

SEQ ID NO: 31984 - RNA, 97 nt, synthetic construct
  source 1..97: mol_type = other RNA
gaatggggtcccccgactctggctttcccccaggtttacatgttcctggtgaaatggcaggacctgtcggagaaggtggtctaccggcgcttcaccg

SEQ ID NO: 31985 - RNA, 97 nt, synthetic construct
  source 1..97: mol_type = other RNA
gaatggggtcccccgactctggctttcccccaggtttacatgttcctggtgaaatggcaggacctgtcggagaaggtggtctaccggcgctttaccg

SEQ ID NO: 31986 - RNA, 97 nt, synthetic construct
  source 1..97: mol_type = other RNA
gaatggggtcccccgactctggctttcccccaggtatacatgttcctggtgaaatggcaggacctgtcggagaaggtggtctaccggcgctttaccg

SEQ ID NO: 31987 - RNA, 97 nt, synthetic construct
  source 1..97: mol_type = other RNA
gaatggggtcccccgactctggctttcccccaggtatacatgttcctggtgaaatggcaggacctgtcggagaaggtggtctaccggcgcttcaccg

SEQ ID NO: 31988 - RNA, 97 nt, synthetic construct
  source 1..97: mol_type = other RNA
gaatggggtcccccgactctggctttcccccaggtctacatgttcctggtgaaatggcaggacctgtcggagaaggtggtctaccggcgctttaccg

SEQ ID NO: 31989 - RNA, 97 nt, synthetic construct
  source 1..97: mol_type = other RNA
gaatggggtcccccgactctggctttcccccaggtctacatgttcctggtgaaatggcaggacctgtcggagaaggtggtctaccggcgcttcaccg

SEQ ID NO: 31990 - RNA, 97 nt, synthetic construct
  source 1..97: mol_type = other RNA
gaatggggtcccccgactctggctttcccccaggtgtacatgttcctggtgaaatggcaggacctgtcggagaaggtggtctaccggcgcttcaccg

SEQ ID NO: 31991 - RNA, 97 nt, synthetic construct
  source 1..97: mol_type = other RNA
gaatggggtcccccgactctggctttcccccaggtgtacatgttcctggtgaaatggcaggacctgtcggagaaggtggtctaccggcgctttaccg

SEQ ID NO: 31992 - RNA, 98 nt, synthetic construct
  source 1..98: mol_type = other RNA
tgaatggggtcccccgactctggctttcccccaggtgtacatgttcctggtgaaatggcaggacctgtcggagaaggtggtctaccggcgcttcaccg

SEQ ID NO: 31993 - RNA, 98 nt, synthetic construct
  source 1..98: mol_type = other RNA
tgaatggggtcccccgactctggctttcccccaggtttacatgttcctggtgaaatggcaggacctgtcggagaaggtggtctaccggcgctttaccg

SEQ ID NO: 31994 - RNA, 98 nt, synthetic construct
  source 1..98: mol_type = other RNA
tgaatggggtcccccgactctggctttcccccaggtgtacatgttcctggtgaaatggcaggacctgtcggagaaggtggtctaccggcgctttaccg

SEQ ID NO: 31995 - RNA, 98 nt, synthetic construct
  source 1..98: mol_type = other RNA
tgaatggggtcccccgactctggctttcccccaggtctacatgttcctggtgaaatggcaggacctgtcggagaaggtggtctaccggcgcttcaccg

SEQ ID NO: 31996 - RNA, 98 nt, synthetic construct
  source 1..98: mol_type = other RNA
tgaatggggtcccccgactctggctttcccccaggtctacatgttcctggtgaaatggcaggacctgtcggagaaggtggtctaccggcgctttaccg

SEQ ID NO: 31997 - RNA, 98 nt, synthetic construct
  source 1..98: mol_type = other RNA
tgaatggggtcccccgactctggctttcccccaggtatacatgttcctggtgaaatggcaggacctgtcggagaaggtggtctaccggcgctttaccg

SEQ ID NO: 31998 - RNA, 98 nt, synthetic construct
  source 1..98: mol_type = other RNA
tgaatggggtcccccgactctggctttcccccaggtttacatgttcctggtgaaatggcaggacctgtcggagaaggtggtctaccggcgcttcaccg

SEQ ID NO: 31999 - RNA, 98 nt, synthetic construct
  source 1..98: mol_type = other RNA
tgaatggggtcccccgactctggctttcccccaggtatacatgttcctggtgaaatggcaggacctgtcggagaaggtggtctaccggcgcttcaccg

SEQ ID NO: 32000 - RNA, 99 nt, synthetic construct
  source 1..99: mol_type = other RNA
ctgaatggggtcccccgactctggctttcccccaggtttacatgttcctggtgaaatggcaggacctgtcggagaaggtggtctaccggcgcttcaccg

SEQ ID NO: 32001 - RNA, 99 nt, synthetic construct
  source 1..99: mol_type = other RNA
ctgaatggggtcccccgactctggctttcccccaggtttacatgttcctggtgaaatggcaggacctgtcggagaaggtggtctaccggcgctttaccg

SEQ ID NO: 32002 - RNA, 99 nt, synthetic construct
  source 1..99: mol_type = other RNA
ctgaatggggtcccccgactctggctttcccccaggtctacatgttcctggtgaaatggcaggacctgtcggagaaggtggtctaccggcgctttaccg

SEQ ID NO: 32003 - RNA, 99 nt, synthetic construct
  source 1..99: mol_type = other RNA
ctgaatggggtcccccgactctggctttcccccaggtatacatgttcctggtgaaatggcaggacctgtcggagaaggtggtctaccggcgcttcaccg

SEQ ID NO: 32004 - RNA, 99 nt, synthetic construct
  source 1..99: mol_type = other RNA
ctgaatggggtcccccgactctggctttcccccaggtctacatgttcctggtgaaatggcaggacctgtcggagaaggtggtctaccggcgcttcaccg

SEQ ID NO: 32005 - RNA, 99 nt, synthetic construct
  source 1..99: mol_type = other RNA
ctgaatggggtcccccgactctggctttcccccaggtatacatgttcctggtgaaatggcaggacctgtcggagaaggtggtctaccggcgctttaccg

SEQ ID NO: 32006 - RNA, 99 nt, synthetic construct
  source 1..99: mol_type = other RNA
ctgaatggggtcccccgactctggctttcccccaggtgtacatgttcctggtgaaatggcaggacctgtcggagaaggtggtctaccggcgctttaccg

SEQ ID NO: 32007 - RNA, 99 nt, synthetic construct
  source 1..99: mol_type = other RNA
ctgaatggggtcccccgactctggctttcccccaggtgtacatgttcctggtgaaatggcaggacctgtcggagaaggtggtctaccggcgcttcaccg

SEQ ID NO: 32008 - RNA, 100 nt, synthetic construct
  source 1..100: mol_type = other RNA
gctgaatggggtcccccgactctggctttcccccaggtgtacatgttcctggtgaaatggcaggacctgtcggagaaggtggtctaccggcgcttcaccg

SEQ ID NO: 32009 - RNA, 100 nt, synthetic construct
  source 1..100: mol_type = other RNA
gctgaatggggtcccccgactctggctttcccccaggtctacatgttcctggtgaaatggcaggacctgtcggagaaggtggtctaccggcgcttcaccg

SEQ ID NO: 32010 - RNA, 100 nt, synthetic construct
  source 1..100: mol_type = other RNA
gctgaatggggtcccccgactctggctttcccccaggtatacatgttcctggtgaaatggcaggacctgtcggagaaggtggtctaccggcgctttaccg

SEQ ID NO: 32011 - RNA, 100 nt, synthetic construct
  source 1..100: mol_type = other RNA
gctgaatggggtcccccgactctggctttcccccaggtttacatgttcctggtgaaatggcaggacctgtcggagaaggtggtctaccggcgctttaccg

SEQ ID NO: 32012 - RNA, 100 nt, synthetic construct
  source 1..100: mol_type = other RNA
gctgaatggggtcccccgactctggctttcccccaggtttacatgttcctggtgaaatggcaggacctgtcggagaaggtggtctaccggcgcttcaccg

SEQ ID NO: 32013 - RNA, 100 nt, synthetic construct
  source 1..100: mol_type = other RNA
gctgaatggggtcccccgactctggctttcccccaggtatacatgttcctggtgaaatggcaggacctgtcggagaaggtggtctaccggcgcttcaccg

SEQ ID NO: 32014 - RNA, 100 nt, synthetic construct
  source 1..100: mol_type = other RNA
gctgaatggggtcccccgactctggctttcccccaggtgtacatgttcctggtgaaatggcaggacctgtcggagaaggtggtctaccggcgctttaccg

SEQ ID NO: 32015 - RNA, 100 nt, synthetic construct
  source 1..100: mol_type = other RNA
gctgaatggggtcccccgactctggctttcccccaggtctacatgttcctggtgaaatggcaggacctgtcggagaaggtggtctaccggcgctttaccg

SEQ ID NO: 32016 - RNA, 101 nt, synthetic construct
  source 1..101: mol_type = other RNA
ggctgaatggggtcccccgactctggctttcccccaggtatacatgttcctggtgaaatggcaggacctgtcggagaaggtggtctaccggcgcttcaccg

SEQ ID NO: 32017 - RNA, 101 nt, synthetic construct
  source 1..101: mol_type = other RNA
ggctgaatggggtcccccgactctggctttcccccaggtatacatgttcctggtgaaatggcaggacctgtcggagaaggtggtctaccggcgctttaccg

SEQ ID NO: 32018 - RNA, 101 nt, synthetic construct
  source 1..101: mol_type = other RNA
ggctgaatggggtcccccgactctggctttcccccaggtttacatgttcctggtgaaatggcaggacctgtcggagaaggtggtctaccggcgctttaccg

SEQ ID NO: 32019 - RNA, 101 nt, synthetic construct
  source 1..101: mol_type = other RNA
ggctgaatggggtcccccgactctggctttcccccaggtttacatgttcctggtgaaatggcaggacctgtcggagaaggtggtctaccggcgcttcaccg

SEQ ID NO: 32020 - RNA, 101 nt, synthetic construct
  source 1..101: mol_type = other RNA
ggctgaatggggtcccccgactctggctttcccccaggtgtacatgttcctggtgaaatggcaggacctgtcggagaaggtggtctaccggcgctttaccg

SEQ ID NO: 32021 - RNA, 101 nt, synthetic construct
  source 1..101: mol_type = other RNA
ggctgaatggggtcccccgactctggctttcccccaggtgtacatgttcctggtgaaatggcaggacctgtcggagaaggtggtctaccggcgcttcaccg

SEQ ID NO: 32022 - RNA, 101 nt, synthetic construct
  source 1..101: mol_type = other RNA
ggctgaatggggtcccccgactctggctttcccccaggtctacatgttcctggtgaaatggcaggacctgtcggagaaggtggtctaccggcgctttaccg

SEQ ID NO: 32023 - RNA, 101 nt, synthetic construct
  source 1..101: mol_type = other RNA
ggctgaatggggtcccccgactctggctttcccccaggtctacatgttcctggtgaaatggcaggacctgtcggagaaggtggtctaccggcgcttcaccg

SEQ ID NO: 32024 - RNA, 102 nt, synthetic construct
  source 1..102: mol_type = other RNA
aggctgaatggggtcccccgactctggctttcccccaggtttacatgttcctggtgaaatggcaggacctgtcggagaaggtggtctaccggcgcttcaccg

SEQ ID NO: 32025 - RNA, 102 nt, synthetic construct
  source 1..102: mol_type = other RNA
aggctgaatggggtcccccgactctggctttcccccaggtctacatgttcctggtgaaatggcaggacctgtcggagaaggtggtctaccggcgctttaccg

SEQ ID NO: 32026 - RNA, 102 nt, synthetic construct
  source 1..102: mol_type = other RNA
aggctgaatggggtcccccgactctggctttcccccaggtgtacatgttcctggtgaaatggcaggacctgtcggagaaggtggtctaccggcgctttaccg

SEQ ID NO: 32027 - RNA, 102 nt, synthetic construct
  source 1..102: mol_type = other RNA
aggctgaatggggtcccccgactctggctttcccccaggtatacatgttcctggtgaaatggcaggacctgtcggagaaggtggtctaccggcgcttcaccg

SEQ ID NO: 32028 - RNA, 102 nt, synthetic construct
  source 1..102: mol_type = other RNA
aggctgaatggggtcccccgactctggctttcccccaggtctacatgttcctggtgaaatggcaggacctgtcggagaaggtggtctaccggcgcttcaccg

SEQ ID NO: 32029 - RNA, 102 nt, synthetic construct
  source 1..102: mol_type = other RNA
aggctgaatggggtcccccgactctggctttcccccaggtgtacatgttcctggtgaaatggcaggacctgtcggagaaggtggtctaccggcgcttcaccg

SEQ ID NO: 32030 - RNA, 102 nt, synthetic construct
  source 1..102: mol_type = other RNA
aggctgaatggggtcccccgactctggctttcccccaggtttacatgttcctggtgaaatggcaggacctgtcggagaaggtggtctaccggcgctttaccg

SEQ ID NO: 32031 - RNA, 102 nt, synthetic construct
  source 1..102: mol_type = other RNA
aggctgaatggggtcccccgactctggctttcccccaggtatacatgttcctggtgaaatggcaggacctgtcggagaaggtggtctaccggcgctttaccg

SEQ ID NO: 32032 - RNA, 103 nt, synthetic construct
  source 1..103: mol_type = other RNA
gaggctgaatggggtcccccgactctggctttcccccaggtgtacatgttcctggtgaaatggcaggacctgtcggagaaggtggtctaccggcgcttcaccg

SEQ ID NO: 32033 - RNA, 103 nt, synthetic construct
  source 1..103: mol_type = other RNA
gaggctgaatggggtcccccgactctggctttcccccaggtttacatgttcctggtgaaatggcaggacctgtcggagaaggtggtctaccggcgctttaccg

SEQ ID NO: 32034 - RNA, 103 nt, synthetic construct
  source 1..103: mol_type = other RNA
gaggctgaatggggtcccccgactctggctttcccccaggtctacatgttcctggtgaaatggcaggacctgtcggagaaggtggtctaccggcgctttaccg

SEQ ID NO: 32035 - RNA, 103 nt, synthetic construct
  source 1..103: mol_type = other RNA
gaggctgaatggggtcccccgactctggctttcccccaggtctacatgttcctggtgaaatggcaggacctgtcggagaaggtggtctaccggcgcttcaccg

SEQ ID NO: 32036 - RNA, 103 nt, synthetic construct
  source 1..103: mol_type = other RNA
gaggctgaatggggtcccccgactctggctttcccccaggtatacatgttcctggtgaaatggcaggacctgtcggagaaggtggtctaccggcgctttaccg

SEQ ID NO: 32037 - RNA, 103 nt, synthetic construct
  source 1..103: mol_type = other RNA
gaggctgaatggggtcccccgactctggctttcccccaggtatacatgttcctggtgaaatggcaggacctgtcggagaaggtggtctaccggcgcttcaccg

SEQ ID NO: 32038 - RNA, 103 nt, synthetic construct
  source 1..103: mol_type = other RNA
gaggctgaatggggtcccccgactctggctttcccccaggtgtacatgttcctggtgaaatggcaggacctgtcggagaaggtggtctaccggcgctttaccg

SEQ ID NO: 32039 - RNA, 103 nt, synthetic construct
  source 1..103: mol_type = other RNA
gaggctgaatggggtcccccgactctggctttcccccaggtttacatgttcctggtgaaatggcaggacctgtcggagaaggtggtctaccggcgcttcaccg

SEQ ID NO: 32040 - RNA, 20 nt, synthetic construct
  source 1..20: mol_type = other RNA
gtggtctaccggcgctttac

SEQ ID NO: 32041 - RNA, 20 nt, synthetic construct
  source 1..20: mol_type = other RNA
ggtctaccggcgctttaccg

SEQ ID NO: 32042 - RNA, 16 nt, synthetic construct
  source 1..16: mol_type = other RNA
atctcggtgaagcgcc

SEQ ID NO: 32043 - RNA, 17 nt, synthetic construct
  source 1..17: mol_type = other RNA
gatctcggtgaagcgcc

SEQ ID NO: 32044 - RNA, 18 nt, synthetic construct
  source 1..18: mol_type = other RNA
agatctcggtgaagcgcc

SEQ ID NO: 32045 - RNA, 19 nt, synthetic construct
  source 1..19: mol_type = other RNA
tagatctcggtgaagcgcc

SEQ ID NO: 32046 - RNA, 20 nt, synthetic construct
  source 1..20: mol_type = other RNA
gtagatctcggtgaagcgcc

SEQ ID NO: 32047 - RNA, 21 nt, synthetic construct
  source 1..21: mol_type = other RNA
cgtagatctcggtgaagcgcc

SEQ ID NO: 32048 - RNA, 22 nt, synthetic construct
  source 1..22: mol_type = other RNA
tcgtagatctcggtgaagcgcc

SEQ ID NO: 32049-32055 - skipped (7 entries)

SEQ ID NO: 32056 - RNA, 10 nt, synthetic construct
  source 1..10: mol_type = other RNA
gcttcaccga

SEQ ID NO: 32057 - RNA, 11 nt, synthetic construct
  source 1..11: mol_type = other RNA
gcttcaccgag

SEQ ID NO: 32058 - RNA, 12 nt, synthetic construct
  source 1..12: mol_type = other RNA
gcttcaccgaga

SEQ ID NO: 32059 - RNA, 13 nt, synthetic construct
  source 1..13: mol_type = other RNA
gcttcaccgagat

SEQ ID NO: 32060 - RNA, 14 nt, synthetic construct
  source 1..14: mol_type = other RNA
gcttcaccgagatc

SEQ ID NO: 32061 - RNA, 15 nt, synthetic construct
  source 1..15: mol_type = other RNA
gcttcaccgagatct

SEQ ID NO: 32062 - RNA, 16 nt, synthetic construct
  source 1..16: mol_type = other RNA
gcttcaccgagatcta

SEQ ID NO: 32063 - RNA, 17 nt, synthetic construct
  source 1..17: mol_type = other RNA
gcttcaccgagatctac

SEQ ID NO: 32064 - RNA, 18 nt, synthetic construct
  source 1..18: mol_type = other RNA
gcttcaccgagatctacg

SEQ ID NO: 32065 - RNA, 19 nt, synthetic construct
  source 1..19: mol_type = other RNA
gcttcaccgagatctacga

SEQ ID NO: 32066 - RNA, 55 nt, synthetic construct
  source 1..55: mol_type = other RNA
gtttacatgttcctggtgaaatggcaggacctgtcggagaaggtggtctatcggc

SEQ ID NO: 32067 - RNA, 55 nt, synthetic construct
  source 1..55: mol_type = other RNA
gtatacatgttcctggtgaaatggcaggacctgtcggagaaggtggtctatcggc

SEQ ID NO: 32068 - RNA, 55 nt, synthetic construct
  source 1..55: mol_type = other RNA
gtctacatgttcctggtgaaatggcaggacctgtcggagaaggtggtctatcggc

SEQ ID NO: 32069 - RNA, 55 nt, synthetic construct
  source 1..55: mol_type = other RNA
gtctacatgttcctggtgaaatggcaggacctgtcggagaaggtggtctaccggc

SEQ ID NO: 32070 - RNA, 55 nt, synthetic construct
  source 1..55: mol_type = other RNA
gtttacatgttcctggtgaaatggcaggacctgtcggagaaggtggtctaccggc

SEQ ID NO: 32071 - RNA, 55 nt, synthetic construct
  source 1..55: mol_type = other RNA
gtgtacatgttcctggtgaaatggcaggacctgtcggagaaggtggtctaccggc

SEQ ID NO: 32072 - RNA, 55 nt, synthetic construct
  source 1..55: mol_type = other RNA
gtatacatgttcctggtgaaatggcaggacctgtcggagaaggtggtctaccggc

SEQ ID NO: 32073 - RNA, 55 nt, synthetic construct
  source 1..55: mol_type = other RNA
gtgtacatgttcctggtgaaatggcaggacctgtcggagaaggtggtctatcggc

SEQ ID NO: 32074 - RNA, 56 nt, synthetic construct
  source 1..56: mol_type = other RNA
ggtttacatgttcctggtgaaatggcaggacctgtcggagaaggtggtctatcggc

SEQ ID NO: 32075 - RNA, 56 nt, synthetic construct
  source 1..56: mol_type = other RNA
ggtctacatgttcctggtgaaatggcaggacctgtcggagaaggtggtctatcggc

SEQ ID NO: 32076 - RNA, 56 nt, synthetic construct
  source 1..56: mol_type = other RNA
ggtatacatgttcctggtgaaatggcaggacctgtcggagaaggtggtctaccggc

SEQ ID NO: 32077 - RNA, 56 nt, synthetic construct
  source 1..56: mol_type = other RNA
ggtatacatgttcctggtgaaatggcaggacctgtcggagaaggtggtctatcggc

SEQ ID NO: 32078 - RNA, 56 nt, synthetic construct
  source 1..56: mol_type = other RNA
ggtctacatgttcctggtgaaatggcaggacctgtcggagaaggtggtctaccggc

SEQ ID NO: 32079 - RNA, 56 nt, synthetic construct
  source 1..56: mol_type = other RNA
ggtttacatgttcctggtgaaatggcaggacctgtcggagaaggtggtctaccggc

SEQ ID NO: 32080 - RNA, 56 nt, synthetic construct
  source 1..56: mol_type = other RNA
ggtgtacatgttcctggtgaaatggcaggacctgtcggagaaggtggtctatcggc

SEQ ID NO: 32081 - RNA, 56 nt, synthetic construct
  source 1..56: mol_type = other RNA
ggtgtacatgttcctggtgaaatggcaggacctgtcggagaaggtggtctaccggc

SEQ ID NO: 32082 - RNA, 57 nt, synthetic construct
  source 1..57: mol_type = other RNA
aggtctacatgttcctggtgaaatggcaggacctgtcggagaaggtggtctatcggc

SEQ ID NO: 32083 - RNA, 57 nt, synthetic construct
  source 1..57: mol_type = other RNA
aggtatacatgttcctggtgaaatggcaggacctgtcggagaaggtggtctatcggc

SEQ ID NO: 32084 - RNA, 57 nt, synthetic construct
  source 1..57: mol_type = other RNA
aggtttacatgttcctggtgaaatggcaggacctgtcggagaaggtggtctatcggc

SEQ ID NO: 32085 - RNA, 57 nt, synthetic construct
  source 1..57: mol_type = other RNA
aggtttacatgttcctggtgaaatggcaggacctgtcggagaaggtggtctaccggc

SEQ ID NO: 32086 - RNA, 57 nt, synthetic construct
  source 1..57: mol_type = other RNA
aggtctacatgttcctggtgaaatggcaggacctgtcggagaaggtggtctaccggc

SEQ ID NO: 32087 - RNA, 57 nt, synthetic construct
  source 1..57: mol_type = other RNA
aggtgtacatgttcctggtgaaatggcaggacctgtcggagaaggtggtctatcggc

SEQ ID NO: 32088 - RNA, 57 nt, synthetic construct
  source 1..57: mol_type = other RNA
aggtatacatgttcctggtgaaatggcaggacctgtcggagaaggtggtctaccggc

SEQ ID NO: 32089 - RNA, 57 nt, synthetic construct
  source 1..57: mol_type = other RNA
aggtgtacatgttcctggtgaaatggcaggacctgtcggagaaggtggtctaccggc

SEQ ID NO: 32090 - RNA, 58 nt, synthetic construct
  source 1..58: mol_type = other RNA
caggtgtacatgttcctggtgaaatggcaggacctgtcggagaaggtggtctatcggc

SEQ ID NO: 32091 - RNA, 58 nt, synthetic construct
  source 1..58: mol_type = other RNA
caggtatacatgttcctggtgaaatggcaggacctgtcggagaaggtggtctatcggc

SEQ ID NO: 32092 - RNA, 58 nt, synthetic construct
  source 1..58: mol_type = other RNA
caggtgtacatgttcctggtgaaatggcaggacctgtcggagaaggtggtctaccggc

SEQ ID NO: 32093 - RNA, 58 nt, synthetic construct
  source 1..58: mol_type = other RNA
caggtctacatgttcctggtgaaatggcaggacctgtcggagaaggtggtctatcggc

SEQ ID NO: 32094 - RNA, 58 nt, synthetic construct
  source 1..58: mol_type = other RNA
caggtttacatgttcctggtgaaatggcaggacctgtcggagaaggtggtctaccggc

SEQ ID NO: 32095 - RNA, 58 nt, synthetic construct
  source 1..58: mol_type = other RNA
caggtttacatgttcctggtgaaatggcaggacctgtcggagaaggtggtctatcggc

SEQ ID NO: 32096 - RNA, 58 nt, synthetic construct
  source 1..58: mol_type = other RNA
caggtatacatgttcctggtgaaatggcaggacctgtcggagaaggtggtctaccggc

SEQ ID NO: 32097 - RNA, 58 nt, synthetic construct
  source 1..58: mol_type = other RNA
caggtctacatgttcctggtgaaatggcaggacctgtcggagaaggtggtctaccggc

SEQ ID NO: 32098 - RNA, 59 nt, synthetic construct
  source 1..59: mol_type = other RNA
ccaggtatacatgttcctggtgaaatggcaggacctgtcggagaaggtggtctaccggc

SEQ ID NO: 32099 - RNA, 59 nt, synthetic construct
  source 1..59: mol_type = other RNA
ccaggtgtacatgttcctggtgaaatggcaggacctgtcggagaaggtggtctaccggc

SEQ ID NO: 32100 - RNA, 59 nt, synthetic construct
  source 1..59: mol_type = other RNA
ccaggtttacatgttcctggtgaaatggcaggacctgtcggagaaggtggtctatcggc

SEQ ID NO: 32101 - RNA, 59 nt, synthetic construct
  source 1..59: mol_type = other RNA
ccaggtttacatgttcctggtgaaatggcaggacctgtcggagaaggtggtctaccggc

SEQ ID NO: 32102 - RNA, 59 nt, synthetic construct
  source 1..59: mol_type = other RNA
ccaggtgtacatgttcctggtgaaatggcaggacctgtcggagaaggtggtctatcggc

SEQ ID NO: 32103 - RNA, 59 nt, synthetic construct
  source 1..59: mol_type = other RNA
ccaggtatacatgttcctggtgaaatggcaggacctgtcggagaaggtggtctatcggc

SEQ ID NO: 32104 - RNA, 59 nt, synthetic construct
  source 1..59: mol_type = other RNA
ccaggtctacatgttcctggtgaaatggcaggacctgtcggagaaggtggtctatcggc

SEQ ID NO: 32105 - RNA, 59 nt, synthetic construct
  source 1..59: mol_type = other RNA
ccaggtctacatgttcctggtgaaatggcaggacctgtcggagaaggtggtctaccggc

SEQ ID NO: 32106 - RNA, 60 nt, synthetic construct
  source 1..60: mol_type = other RNA
cccaggtgtacatgttcctggtgaaatggcaggacctgtcggagaaggtggtctaccggc

SEQ ID NO: 32107 - RNA, 60 nt, synthetic construct
  source 1..60: mol_type = other RNA
cccaggtctacatgttcctggtgaaatggcaggacctgtcggagaaggtggtctaccggc

SEQ ID NO: 32108 - RNA, 60 nt, synthetic construct
  source 1..60: mol_type = other RNA
cccaggtctacatgttcctggtgaaatggcaggacctgtcggagaaggtggtctatcggc

SEQ ID NO: 32109 - RNA, 60 nt, synthetic construct
  source 1..60: mol_type = other RNA
cccaggtatacatgttcctggtgaaatggcaggacctgtcggagaaggtggtctatcggc

SEQ ID NO: 32110 - RNA, 60 nt, synthetic construct
  source 1..60: mol_type = other RNA
cccaggtgtacatgttcctggtgaaatggcaggacctgtcggagaaggtggtctatcggc

SEQ ID NO: 32111 - RNA, 60 nt, synthetic construct
  source 1..60: mol_type = other RNA
cccaggtttacatgttcctggtgaaatggcaggacctgtcggagaaggtggtctaccggc

SEQ ID NO: 32112 - RNA, 60 nt, synthetic construct
  source 1..60: mol_type = other RNA
cccaggtttacatgttcctggtgaaatggcaggacctgtcggagaaggtggtctatcggc

SEQ ID NO: 32113 - RNA, 60 nt, synthetic construct
  source 1..60: mol_type = other RNA
cccaggtatacatgttcctggtgaaatggcaggacctgtcggagaaggtggtctaccggc

SEQ ID NO: 32114 - RNA, 61 nt, synthetic construct
  source 1..61: mol_type = other RNA
ccccaggtctacatgttcctggtgaaatggcaggacctgtcggagaaggtggtctaccggc

SEQ ID NO: 32115 - RNA, 61 nt, synthetic construct
  source 1..61: mol_type = other RNA
ccccaggtatacatgttcctggtgaaatggcaggacctgtcggagaaggtggtctatcggc

SEQ ID NO: 32116 - RNA, 61 nt, synthetic construct
  source 1..61: mol_type = other RNA
ccccaggtatacatgttcctggtgaaatggcaggacctgtcggagaaggtggtctaccggc

SEQ ID NO: 32117 - RNA, 61 nt, synthetic construct
  source 1..61: mol_type = other RNA
ccccaggtttacatgttcctggtgaaatggcaggacctgtcggagaaggtggtctaccggc

SEQ ID NO: 32118 - RNA, 61 nt, synthetic construct
  source 1..61: mol_type = other RNA
ccccaggtctacatgttcctggtgaaatggcaggacctgtcggagaaggtggtctatcggc

SEQ ID NO: 32119 - RNA, 61 nt, synthetic construct
  source 1..61: mol_type = other RNA
ccccaggtttacatgttcctggtgaaatggcaggacctgtcggagaaggtggtctatcggc

SEQ ID NO: 32120 - RNA, 61 nt, synthetic construct
  source 1..61: mol_type = other RNA
ccccaggtgtacatgttcctggtgaaatggcaggacctgtcggagaaggtggtctatcggc

SEQ ID NO: 32121 - RNA, 61 nt, synthetic construct
  source 1..61: mol_type = other RNA
ccccaggtgtacatgttcctggtgaaatggcaggacctgtcggagaaggtggtctaccggc

SEQ ID NO: 32122 - RNA, 62 nt, synthetic construct
  source 1..62: mol_type = other RNA
cccccaggtatacatgttcctggtgaaatggcaggacctgtcggagaaggtggtctatcggc

SEQ ID NO: 32123 - RNA, 62 nt, synthetic construct
  source 1..62: mol_type = other RNA
cccccaggtctacatgttcctggtgaaatggcaggacctgtcggagaaggtggtctaccggc

SEQ ID NO: 32124 - RNA, 62 nt, synthetic construct
  source 1..62: mol_type = other RNA
cccccaggtttacatgttcctggtgaaatggcaggacctgtcggagaaggtggtctaccggc

SEQ ID NO: 32125 - RNA, 62 nt, synthetic construct
  source 1..62: mol_type = other RNA
cccccaggtgtacatgttcctggtgaaatggcaggacctgtcggagaaggtggtctatcggc

SEQ ID NO: 32126 - RNA, 62 nt, synthetic construct
  source 1..62: mol_type = other RNA
cccccaggtatacatgttcctggtgaaatggcaggacctgtcggagaaggtggtctaccggc

SEQ ID NO: 32127 - RNA, 62 nt, synthetic construct
  source 1..62: mol_type = other RNA
cccccaggtgtacatgttcctggtgaaatggcaggacctgtcggagaaggtggtctaccggc

SEQ ID NO: 32128 - RNA, 62 nt, synthetic construct
  source 1..62: mol_type = other RNA
cccccaggtttacatgttcctggtgaaatggcaggacctgtcggagaaggtggtctatcggc

SEQ ID NO: 32129 - RNA, 62 nt, synthetic construct
  source 1..62: mol_type = other RNA
cccccaggtctacatgttcctggtgaaatggcaggacctgtcggagaaggtggtctatcggc

SEQ ID NO: 32130 - RNA, 63 nt, synthetic construct
  source 1..63: mol_type = other RNA
tcccccaggtatacatgttcctggtgaaatggcaggacctgtcggagaaggtggtctatcggc

SEQ ID NO: 32131 - RNA, 63 nt, synthetic construct
  source 1..63: mol_type = other RNA
tcccccaggtctacatgttcctggtgaaatggcaggacctgtcggagaaggtggtctaccggc

SEQ ID NO: 32132 - RNA, 63 nt, synthetic construct
  source 1..63: mol_type = other RNA
tcccccaggtctacatgttcctggtgaaatggcaggacctgtcggagaaggtggtctatcggc

SEQ ID NO: 32133 - RNA, 63 nt, synthetic construct
  source 1..63: mol_type = other RNA
tcccccaggtgtacatgttcctggtgaaatggcaggacctgtcggagaaggtggtctaccggc

SEQ ID NO: 32134 - RNA, 63 nt, synthetic construct
  source 1..63: mol_type = other RNA
tcccccaggtgtacatgttcctggtgaaatggcaggacctgtcggagaaggtggtctatcggc

SEQ ID NO: 32135 - RNA, 63 nt, synthetic construct
  source 1..63: mol_type = other RNA
tcccccaggtttacatgttcctggtgaaatggcaggacctgtcggagaaggtggtctaccggc

SEQ ID NO: 32136 - RNA, 63 nt, synthetic construct
  source 1..63: mol_type = other RNA
tcccccaggtttacatgttcctggtgaaatggcaggacctgtcggagaaggtggtctatcggc

SEQ ID NO: 32137 - RNA, 63 nt, synthetic construct
  source 1..63: mol_type = other RNA
tcccccaggtatacatgttcctggtgaaatggcaggacctgtcggagaaggtggtctaccggc

SEQ ID NO: 32138 - RNA, 64 nt, synthetic construct
  source 1..64: mol_type = other RNA
ttcccccaggtttacatgttcctggtgaaatggcaggacctgtcggagaaggtggtctatcggc

SEQ ID NO: 32139 - RNA, 64 nt, synthetic construct
  source 1..64: mol_type = other RNA
ttcccccaggtttacatgttcctggtgaaatggcaggacctgtcggagaaggtggtctaccggc

SEQ ID NO: 32140 - RNA, 64 nt, synthetic construct
  source 1..64: mol_type = other RNA
ttcccccaggtgtacatgttcctggtgaaatggcaggacctgtcggagaaggtggtctatcggc

SEQ ID NO: 32141 - RNA, 64 nt, synthetic construct
  source 1..64: mol_type = other RNA
ttcccccaggtctacatgttcctggtgaaatggcaggacctgtcggagaaggtggtctatcggc

SEQ ID NO: 32142 - RNA, 64 nt, synthetic construct
  source 1..64: mol_type = other RNA
ttcccccaggtctacatgttcctggtgaaatggcaggacctgtcggagaaggtggtctaccggc

SEQ ID NO: 32143 - RNA, 64 nt, synthetic construct
  source 1..64: mol_type = other RNA
ttcccccaggtatacatgttcctggtgaaatggcaggacctgtcggagaaggtggtctatcggc

SEQ ID NO: 32144 - RNA, 64 nt, synthetic construct
  source 1..64: mol_type = other RNA
ttcccccaggtatacatgttcctggtgaaatggcaggacctgtcggagaaggtggtctaccggc

SEQ ID NO: 32145 - RNA, 64 nt, synthetic construct
  source 1..64: mol_type = other RNA
ttcccccaggtgtacatgttcctggtgaaatggcaggacctgtcggagaaggtggtctaccggc

SEQ ID NO: 32146 - RNA, 65 nt, synthetic construct
  source 1..65: mol_type = other RNA
tttcccccaggtgtacatgttcctggtgaaatggcaggacctgtcggagaaggtggtctatcggc

SEQ ID NO: 32147 - RNA, 65 nt, synthetic construct
  source 1..65: mol_type = other RNA
tttcccccaggtgtacatgttcctggtgaaatggcaggacctgtcggagaaggtggtctaccggc

SEQ ID NO: 32148 - RNA, 65 nt, synthetic construct
  source 1..65: mol_type = other RNA
tttcccccaggtctacatgttcctggtgaaatggcaggacctgtcggagaaggtggtctatcggc

SEQ ID NO: 32149 - RNA, 65 nt, synthetic construct
  source 1..65: mol_type = other RNA
tttcccccaggtatacatgttcctggtgaaatggcaggacctgtcggagaaggtggtctatcggc

SEQ ID NO: 32150 - RNA, 65 nt, synthetic construct
  source 1..65: mol_type = other RNA
tttcccccaggtctacatgttcctggtgaaatggcaggacctgtcggagaaggtggtctaccggc

SEQ ID NO: 32151 - RNA, 65 nt, synthetic construct
  source 1..65: mol_type = other RNA
tttcccccaggtttacatgttcctggtgaaatggcaggacctgtcggagaaggtggtctaccggc

SEQ ID NO: 32152 - RNA, 65 nt, synthetic construct
  source 1..65: mol_type = other RNA
tttcccccaggtttacatgttcctggtgaaatggcaggacctgtcggagaaggtggtctatcggc

SEQ ID NO: 32153 - RNA, 65 nt, synthetic construct
  source 1..65: mol_type = other RNA
tttcccccaggtatacatgttcctggtgaaatggcaggacctgtcggagaaggtggtctaccggc

SEQ ID NO: 32154 - RNA, 66 nt, synthetic construct
  source 1..66: mol_type = other RNA
ctttcccccaggtgtacatgttcctggtgaaatggcaggacctgtcggagaaggtggtctaccggc

SEQ ID NO: 32155 - RNA, 66 nt, synthetic construct
  source 1..66: mol_type = other RNA
ctttcccccaggtttacatgttcctggtgaaatggcaggacctgtcggagaaggtggtctatcggc

SEQ ID NO: 32156 - RNA, 66 nt, synthetic construct
  source 1..66: mol_type = other RNA
ctttcccccaggtgtacatgttcctggtgaaatggcaggacctgtcggagaaggtggtctatcggc

SEQ ID NO: 32157 - RNA, 66 nt, synthetic construct
  source 1..66: mol_type = other RNA
ctttcccccaggtatacatgttcctggtgaaatggcaggacctgtcggagaaggtggtctatcggc

SEQ ID NO: 32158 - RNA, 66 nt, synthetic construct
  source 1..66: mol_type = other RNA
ctttcccccaggtatacatgttcctggtgaaatggcaggacctgtcggagaaggtggtctaccggc

SEQ ID NO: 32159 - RNA, 66 nt, synthetic construct
  source 1..66: mol_type = other RNA
ctttcccccaggtctacatgttcctggtgaaatggcaggacctgtcggagaaggtggtctatcggc

SEQ ID NO: 32160 - RNA, 66 nt, synthetic construct
  source 1..66: mol_type = other RNA
ctttcccccaggtttacatgttcctggtgaaatggcaggacctgtcggagaaggtggtctaccggc

SEQ ID NO: 32161 - RNA, 66 nt, synthetic construct
  source 1..66: mol_type = other RNA
ctttcccccaggtctacatgttcctggtgaaatggcaggacctgtcggagaaggtggtctaccggc

SEQ ID NO: 32162 - RNA, 67 nt, synthetic construct
  source 1..67: mol_type = other RNA
gctttcccccaggtctacatgttcctggtgaaatggcaggacctgtcggagaaggtggtctaccggc

SEQ ID NO: 32163 - RNA, 67 nt, synthetic construct
  source 1..67: mol_type = other RNA
gctttcccccaggtatacatgttcctggtgaaatggcaggacctgtcggagaaggtggtctatcggc

SEQ ID NO: 32164 - RNA, 67 nt, synthetic construct
  source 1..67: mol_type = other RNA
gctttcccccaggtatacatgttcctggtgaaatggcaggacctgtcggagaaggtggtctaccggc

SEQ ID NO: 32165 - RNA, 67 nt, synthetic construct
  source 1..67: mol_type = other RNA
gctttcccccaggtttacatgttcctggtgaaatggcaggacctgtcggagaaggtggtctaccggc

SEQ ID NO: 32166 - RNA, 67 nt, synthetic construct
  source 1..67: mol_type = other RNA
gctttcccccaggtttacatgttcctggtgaaatggcaggacctgtcggagaaggtggtctatcggc

SEQ ID NO: 32167 - RNA, 67 nt, synthetic construct
  source 1..67: mol_type = other RNA
gctttcccccaggtctacatgttcctggtgaaatggcaggacctgtcggagaaggtggtctatcggc

SEQ ID NO: 32168 - RNA, 67 nt, synthetic construct
  source 1..67: mol_type = other RNA
gctttcccccaggtgtacatgttcctggtgaaatggcaggacctgtcggagaaggtggtctaccggc

SEQ ID NO: 32169 - RNA, 67 nt, synthetic construct
  source 1..67: mol_type = other RNA
gctttcccccaggtgtacatgttcctggtgaaatggcaggacctgtcggagaaggtggtctatcggc

SEQ ID NO: 32170 - RNA, 68 nt, synthetic construct
  source 1..68: mol_type = other RNA
ggctttcccccaggtttacatgttcctggtgaaatggcaggacctgtcggagaaggtggtctatcggc

SEQ ID NO: 32171 - RNA, 68 nt, synthetic construct
  source 1..68: mol_type = other RNA
ggctttcccccaggtatacatgttcctggtgaaatggcaggacctgtcggagaaggtggtctaccggc

SEQ ID NO: 32172 - RNA, 68 nt, synthetic construct
  source 1..68: mol_type = other RNA
ggctttcccccaggtatacatgttcctggtgaaatggcaggacctgtcggagaaggtggtctatcggc

SEQ ID NO: 32173 - RNA, 68 nt, synthetic construct
  source 1..68: mol_type = other RNA
ggctttcccccaggtctacatgttcctggtgaaatggcaggacctgtcggagaaggtggtctatcggc

SEQ ID NO: 32174 - RNA, 68 nt, synthetic construct
  source 1..68: mol_type = other RNA
ggctttcccccaggtctacatgttcctggtgaaatggcaggacctgtcggagaaggtggtctaccggc

SEQ ID NO: 32175 - RNA, 68 nt, synthetic construct
  source 1..68: mol_type = other RNA
ggctttcccccaggtgtacatgttcctggtgaaatggcaggacctgtcggagaaggtggtctatcggc

SEQ ID NO: 32176 - RNA, 68 nt, synthetic construct
  source 1..68: mol_type = other RNA
ggctttcccccaggtttacatgttcctggtgaaatggcaggacctgtcggagaaggtggtctaccggc

SEQ ID NO: 32177 - RNA, 68 nt, synthetic construct
  source 1..68: mol_type = other RNA
ggctttcccccaggtgtacatgttcctggtgaaatggcaggacctgtcggagaaggtggtctaccggc

SEQ ID NO: 32178 - RNA, 69 nt, synthetic construct
  source 1..69: mol_type = other RNA
tggctttcccccaggtgtacatgttcctggtgaaatggcaggacctgtcggagaaggtggtctaccggc

SEQ ID NO: 32179 - RNA, 69 nt, synthetic construct
  source 1..69: mol_type = other RNA
tggctttcccccaggtgtacatgttcctggtgaaatggcaggacctgtcggagaaggtggtctatcggc

SEQ ID NO: 32180 - RNA, 69 nt, synthetic construct
  source 1..69: mol_type = other RNA
tggctttcccccaggtctacatgttcctggtgaaatggcaggacctgtcggagaaggtggtctatcggc

SEQ ID NO: 32181 - RNA, 69 nt, synthetic construct
  source 1..69: mol_type = other RNA
tggctttcccccaggtatacatgttcctggtgaaatggcaggacctgtcggagaaggtggtctaccggc

SEQ ID NO: 32182 - RNA, 69 nt, synthetic construct
  source 1..69: mol_type = other RNA
tggctttcccccaggtatacatgttcctggtgaaatggcaggacctgtcggagaaggtggtctatcggc

SEQ ID NO: 32183 - RNA, 69 nt, synthetic construct
  source 1..69: mol_type = other RNA
tggctttcccccaggtttacatgttcctggtgaaatggcaggacctgtcggagaaggtggtctatcggc

SEQ ID NO: 32184 - RNA, 69 nt, synthetic construct
  source 1..69: mol_type = other RNA
tggctttcccccaggtttacatgttcctggtgaaatggcaggacctgtcggagaaggtggtctaccggc

SEQ ID NO: 32185 - RNA, 69 nt, synthetic construct
  source 1..69: mol_type = other RNA
tggctttcccccaggtctacatgttcctggtgaaatggcaggacctgtcggagaaggtggtctaccggc

SEQ ID NO: 32186 - RNA, 70 nt, synthetic construct
  source 1..70: mol_type = other RNA
ctggctttcccccaggtatacatgttcctggtgaaatggcaggacctgtcggagaaggtggtctaccggc

SEQ ID NO: 32187 - RNA, 70 nt, synthetic construct
  source 1..70: mol_type = other RNA
ctggctttcccccaggtatacatgttcctggtgaaatggcaggacctgtcggagaaggtggtctatcggc

SEQ ID NO: 32188 - RNA, 70 nt, synthetic construct
  source 1..70: mol_type = other RNA
ctggctttcccccaggtgtacatgttcctggtgaaatggcaggacctgtcggagaaggtggtctaccggc

SEQ ID NO: 32189 - RNA, 70 nt, synthetic construct
  source 1..70: mol_type = other RNA
ctggctttcccccaggtctacatgttcctggtgaaatggcaggacctgtcggagaaggtggtctatcggc

SEQ ID NO: 32190 - RNA, 70 nt, synthetic construct
  source 1..70: mol_type = other RNA
ctggctttcccccaggtgtacatgttcctggtgaaatggcaggacctgtcggagaaggtggtctatcggc

SEQ ID NO: 32191 - RNA, 70 nt, synthetic construct
  source 1..70: mol_type = other RNA
ctggctttcccccaggtttacatgttcctggtgaaatggcaggacctgtcggagaaggtggtctaccggc

SEQ ID NO: 32192 - RNA, 70 nt, synthetic construct
  source 1..70: mol_type = other RNA
ctggctttcccccaggtttacatgttcctggtgaaatggcaggacctgtcggagaaggtggtctatcggc

SEQ ID NO: 32193 - RNA, 70 nt, synthetic construct
  source 1..70: mol_type = other RNA
ctggctttcccccaggtctacatgttcctggtgaaatggcaggacctgtcggagaaggtggtctaccggc

SEQ ID NO: 32194 - RNA, 71 nt, synthetic construct
  source 1..71: mol_type = other RNA
tctggctttcccccaggtttacatgttcctggtgaaatggcaggacctgtcggagaaggtggtctatcggc

SEQ ID NO: 32195 - RNA, 71 nt, synthetic construct
  source 1..71: mol_type = other RNA
tctggctttcccccaggtctacatgttcctggtgaaatggcaggacctgtcggagaaggtggtctatcggc

SEQ ID NO: 32196 - RNA, 71 nt, synthetic construct
  source 1..71: mol_type = other RNA
tctggctttcccccaggtgtacatgttcctggtgaaatggcaggacctgtcggagaaggtggtctaccggc

SEQ ID NO: 32197 - RNA, 71 nt, synthetic construct
  source 1..71: mol_type = other RNA
tctggctttcccccaggtatacatgttcctggtgaaatggcaggacctgtcggagaaggtggtctaccggc

SEQ ID NO: 32198 - RNA, 71 nt, synthetic construct
  source 1..71: mol_type = other RNA
tctggctttcccccaggtatacatgttcctggtgaaatggcaggacctgtcggagaaggtggtctatcggc

SEQ ID NO: 32199 - RNA, 71 nt, synthetic construct
  source 1..71: mol_type = other RNA
tctggctttcccccaggtctacatgttcctggtgaaatggcaggacctgtcggagaaggtggtctaccggc

SEQ ID NO: 32200 - RNA, 71 nt, synthetic construct
  source 1..71: mol_type = other RNA
tctggctttcccccaggtgtacatgttcctggtgaaatggcaggacctgtcggagaaggtggtctatcggc

SEQ ID NO: 32201 - RNA, 71 nt, synthetic construct
  source 1..71: mol_type = other RNA
tctggctttcccccaggtttacatgttcctggtgaaatggcaggacctgtcggagaaggtggtctaccggc

SEQ ID NO: 32202 - RNA, 72 nt, synthetic construct
  source 1..72: mol_type = other RNA
ctctggctttcccccaggtgtacatgttcctggtgaaatggcaggacctgtcggagaaggtggtctatcggc

SEQ ID NO: 32203 - RNA, 72 nt, synthetic construct
  source 1..72: mol_type = other RNA
ctctggctttcccccaggtttacatgttcctggtgaaatggcaggacctgtcggagaaggtggtctaccggc

SEQ ID NO: 32204 - RNA, 72 nt, synthetic construct
  source 1..72: mol_type = other RNA
ctctggctttcccccaggtgtacatgttcctggtgaaatggcaggacctgtcggagaaggtggtctaccggc

SEQ ID NO: 32205 - RNA, 72 nt, synthetic construct
  source 1..72: mol_type = other RNA
ctctggctttcccccaggtttacatgttcctggtgaaatggcaggacctgtcggagaaggtggtctatcggc

SEQ ID NO: 32206 - RNA, 72 nt, synthetic construct
  source 1..72: mol_type = other RNA
ctctggctttcccccaggtatacatgttcctggtgaaatggcaggacctgtcggagaaggtggtctaccggc

SEQ ID NO: 32207 - RNA, 72 nt, synthetic construct
  source 1..72: mol_type = other RNA
ctctggctttcccccaggtatacatgttcctggtgaaatggcaggacctgtcggagaaggtggtctatcggc

SEQ ID NO: 32208 - RNA, 72 nt, synthetic construct
  source 1..72: mol_type = other RNA
ctctggctttcccccaggtctacatgttcctggtgaaatggcaggacctgtcggagaaggtggtctaccggc

SEQ ID NO: 32209 - RNA, 72 nt, synthetic construct
  source 1..72: mol_type = other RNA
ctctggctttcccccaggtctacatgttcctggtgaaatggcaggacctgtcggagaaggtggtctatcggc

SEQ ID NO: 32210 - RNA, 73 nt, synthetic construct
  source 1..73: mol_type = other RNA
actctggctttcccccaggtttacatgttcctggtgaaatggcaggacctgtcggagaaggtggtctatcggc

SEQ ID NO: 32211 - RNA, 73 nt, synthetic construct
  source 1..73: mol_type = other RNA
actctggctttcccccaggtctacatgttcctggtgaaatggcaggacctgtcggagaaggtggtctatcggc

SEQ ID NO: 32212 - RNA, 73 nt, synthetic construct
  source 1..73: mol_type = other RNA
actctggctttcccccaggtctacatgttcctggtgaaatggcaggacctgtcggagaaggtggtctaccggc

SEQ ID NO: 32213 - RNA, 73 nt, synthetic construct
  source 1..73: mol_type = other RNA
actctggctttcccccaggtttacatgttcctggtgaaatggcaggacctgtcggagaaggtggtctaccggc

SEQ ID NO: 32214 - RNA, 73 nt, synthetic construct
  source 1..73: mol_type = other RNA
actctggctttcccccaggtgtacatgttcctggtgaaatggcaggacctgtcggagaaggtggtctatcggc

SEQ ID NO: 32215 - RNA, 73 nt, synthetic construct
  source 1..73: mol_type = other RNA
actctggctttcccccaggtgtacatgttcctggtgaaatggcaggacctgtcggagaaggtggtctaccggc

SEQ ID NO: 32216 - RNA, 73 nt, synthetic construct
  source 1..73: mol_type = other RNA
actctggctttcccccaggtatacatgttcctggtgaaatggcaggacctgtcggagaaggtggtctaccggc

SEQ ID NO: 32217 - RNA, 73 nt, synthetic construct
  source 1..73: mol_type = other RNA
actctggctttcccccaggtatacatgttcctggtgaaatggcaggacctgtcggagaaggtggtctatcggc

SEQ ID NO: 32218 - RNA, 74 nt, synthetic construct
  source 1..74: mol_type = other RNA
gactctggctttcccccaggtctacatgttcctggtgaaatggcaggacctgtcggagaaggtggtctatcggc

SEQ ID NO: 32219 - RNA, 74 nt, synthetic construct
  source 1..74: mol_type = other RNA
gactctggctttcccccaggtgtacatgttcctggtgaaatggcaggacctgtcggagaaggtggtctatcggc

SEQ ID NO: 32220 - RNA, 74 nt, synthetic construct
  source 1..74: mol_type = other RNA
gactctggctttcccccaggtatacatgttcctggtgaaatggcaggacctgtcggagaaggtggtctatcggc

SEQ ID NO: 32221 - RNA, 74 nt, synthetic construct
  source 1..74: mol_type = other RNA
gactctggctttcccccaggtatacatgttcctggtgaaatggcaggacctgtcggagaaggtggtctaccggc

SEQ ID NO: 32222 - RNA, 74 nt, synthetic construct
  source 1..74: mol_type = other RNA
gactctggctttcccccaggtgtacatgttcctggtgaaatggcaggacctgtcggagaaggtggtctaccggc

SEQ ID NO: 32223 - RNA, 74 nt, synthetic construct
  source 1..74: mol_type = other RNA
gactctggctttcccccaggtttacatgttcctggtgaaatggcaggacctgtcggagaaggtggtctatcggc

SEQ ID NO: 32224 - RNA, 74 nt, synthetic construct
  source 1..74: mol_type = other RNA
gactctggctttcccccaggtttacatgttcctggtgaaatggcaggacctgtcggagaaggtggtctaccggc

SEQ ID NO: 32225 - RNA, 74 nt, synthetic construct
  source 1..74: mol_type = other RNA
gactctggctttcccccaggtctacatgttcctggtgaaatggcaggacctgtcggagaaggtggtctaccggc

SEQ ID NO: 32226 - RNA, 75 nt, synthetic construct
  source 1..75: mol_type = other RNA
cgactctggctttcccccaggtatacatgttcctggtgaaatggcaggacctgtcggagaaggtggtctatcggc

SEQ ID NO: 32227 - RNA, 75 nt, synthetic construct
  source 1..75: mol_type = other RNA
cgactctggctttcccccaggtatacatgttcctggtgaaatggcaggacctgtcggagaaggtggtctaccggc

SEQ ID NO: 32228 - RNA, 75 nt, synthetic construct
  source 1..75: mol_type = other RNA
cgactctggctttcccccaggtctacatgttcctggtgaaatggcaggacctgtcggagaaggtggtctaccggc

SEQ ID NO: 32229 - RNA, 75 nt, synthetic construct
  source 1..75: mol_type = other RNA
cgactctggctttcccccaggtctacatgttcctggtgaaatggcaggacctgtcggagaaggtggtctatcggc

SEQ ID NO: 32230 - RNA, 75 nt, synthetic construct
  source 1..75: mol_type = other RNA
cgactctggctttcccccaggtgtacatgttcctggtgaaatggcaggacctgtcggagaaggtggtctatcggc

SEQ ID NO: 32231 - RNA, 75 nt, synthetic construct
  source 1..75: mol_type = other RNA
cgactctggctttcccccaggtttacatgttcctggtgaaatggcaggacctgtcggagaaggtggtctaccggc

SEQ ID NO: 32232 - RNA, 75 nt, synthetic construct
  source 1..75: mol_type = other RNA
cgactctggctttcccccaggtttacatgttcctggtgaaatggcaggacctgtcggagaaggtggtctatcggc

SEQ ID NO: 32233 - RNA, 75 nt, synthetic construct
  source 1..75: mol_type = other RNA
cgactctggctttcccccaggtgtacatgttcctggtgaaatggcaggacctgtcggagaaggtggtctaccggc

SEQ ID NO: 32234 - RNA, 76 nt, synthetic construct
  source 1..76: mol_type = other RNA
ccgactctggctttcccccaggtatacatgttcctggtgaaatggcaggacctgtcggagaaggtggtctaccggc

SEQ ID NO: 32235 - RNA, 76 nt, synthetic construct
  source 1..76: mol_type = other RNA
ccgactctggctttcccccaggtatacatgttcctggtgaaatggcaggacctgtcggagaaggtggtctatcggc

SEQ ID NO: 32236 - RNA, 76 nt, synthetic construct
  source 1..76: mol_type = other RNA
ccgactctggctttcccccaggtctacatgttcctggtgaaatggcaggacctgtcggagaaggtggtctaccggc

SEQ ID NO: 32237 - RNA, 76 nt, synthetic construct
  source 1..76: mol_type = other RNA
ccgactctggctttcccccaggtgtacatgttcctggtgaaatggcaggacctgtcggagaaggtggtctaccggc

SEQ ID NO: 32238 - RNA, 76 nt, synthetic construct
  source 1..76: mol_type = other RNA
ccgactctggctttcccccaggtctacatgttcctggtgaaatggcaggacctgtcggagaaggtggtctatcggc

SEQ ID NO: 32239 - RNA, 76 nt, synthetic construct
  source 1..76: mol_type = other RNA
ccgactctggctttcccccaggtttacatgttcctggtgaaatggcaggacctgtcggagaaggtggtctaccggc

SEQ ID NO: 32240 - RNA, 76 nt, synthetic construct
  source 1..76: mol_type = other RNA
ccgactctggctttcccccaggtttacatgttcctggtgaaatggcaggacctgtcggagaaggtggtctatcggc

SEQ ID NO: 32241 - RNA, 76 nt, synthetic construct
  source 1..76: mol_type = other RNA
ccgactctggctttcccccaggtgtacatgttcctggtgaaatggcaggacctgtcggagaaggtggtctatcggc

SEQ ID NO: 32242 - RNA, 77 nt, synthetic construct
  source 1..77: mol_type = other RNA
cccgactctggctttcccccaggtctacatgttcctggtgaaatggcaggacctgtcggagaaggtggtctatcggc

SEQ ID NO: 32243 - RNA, 77 nt, synthetic construct
  source 1..77: mol_type = other RNA
cccgactctggctttcccccaggtttacatgttcctggtgaaatggcaggacctgtcggagaaggtggtctaccggc

SEQ ID NO: 32244 - RNA, 77 nt, synthetic construct
  source 1..77: mol_type = other RNA
cccgactctggctttcccccaggtgtacatgttcctggtgaaatggcaggacctgtcggagaaggtggtctaccggc

SEQ ID NO: 32245 - RNA, 77 nt, synthetic construct
  source 1..77: mol_type = other RNA
cccgactctggctttcccccaggtttacatgttcctggtgaaatggcaggacctgtcggagaaggtggtctatcggc

SEQ ID NO: 32246 - RNA, 77 nt, synthetic construct
  source 1..77: mol_type = other RNA
cccgactctggctttcccccaggtatacatgttcctggtgaaatggcaggacctgtcggagaaggtggtctatcggc

SEQ ID NO: 32247 - RNA, 77 nt, synthetic construct
  source 1..77: mol_type = other RNA
cccgactctggctttcccccaggtatacatgttcctggtgaaatggcaggacctgtcggagaaggtggtctaccggc

SEQ ID NO: 32248 - RNA, 77 nt, synthetic construct
  source 1..77: mol_type = other RNA
cccgactctggctttcccccaggtctacatgttcctggtgaaatggcaggacctgtcggagaaggtggtctaccggc

SEQ ID NO: 32249 - RNA, 77 nt, synthetic construct
  source 1..77: mol_type = other RNA
cccgactctggctttcccccaggtgtacatgttcctggtgaaatggcaggacctgtcggagaaggtggtctatcggc

SEQ ID NO: 32250 - RNA, 78 nt, synthetic construct
  source 1..78: mol_type = other RNA
ccccgactctggctttcccccaggtgtacatgttcctggtgaaatggcaggacctgtcggagaaggtggtctatcggc

SEQ ID NO: 32251 - RNA, 78 nt, synthetic construct
  source 1..78: mol_type = other RNA
ccccgactctggctttcccccaggtgtacatgttcctggtgaaatggcaggacctgtcggagaaggtggtctaccggc

SEQ ID NO: 32252 - RNA, 78 nt, synthetic construct
  source 1..78: mol_type = other RNA
ccccgactctggctttcccccaggtctacatgttcctggtgaaatggcaggacctgtcggagaaggtggtctatcggc

SEQ ID NO: 32253 - RNA, 78 nt, synthetic construct
  source 1..78: mol_type = other RNA
ccccgactctggctttcccccaggtatacatgttcctggtgaaatggcaggacctgtcggagaaggtggtctatcggc

SEQ ID NO: 32254 - RNA, 78 nt, synthetic construct
  source 1..78: mol_type = other RNA
ccccgactctggctttcccccaggtatacatgttcctggtgaaatggcaggacctgtcggagaaggtggtctaccggc

SEQ ID NO: 32255 - RNA, 78 nt, synthetic construct
  source 1..78: mol_type = other RNA
ccccgactctggctttcccccaggtttacatgttcctggtgaaatggcaggacctgtcggagaaggtggtctatcggc

SEQ ID NO: 32256 - RNA, 78 nt, synthetic construct
  source 1..78: mol_type = other RNA
ccccgactctggctttcccccaggtctacatgttcctggtgaaatggcaggacctgtcggagaaggtggtctaccggc

SEQ ID NO: 32257 - RNA, 78 nt, synthetic construct
  source 1..78: mol_type = other RNA
ccccgactctggctttcccccaggtttacatgttcctggtgaaatggcaggacctgtcggagaaggtggtctaccggc

SEQ ID NO: 32258 - RNA, 79 nt, synthetic construct
  source 1..79: mol_type = other RNA
cccccgactctggctttcccccaggtatacatgttcctggtgaaatggcaggacctgtcggagaaggtggtctatcggc

SEQ ID NO: 32259 - RNA, 79 nt, synthetic construct
  source 1..79: mol_type = other RNA
cccccgactctggctttcccccaggtgtacatgttcctggtgaaatggcaggacctgtcggagaaggtggtctatcggc

SEQ ID NO: 32260 - RNA, 79 nt, synthetic construct
  source 1..79: mol_type = other RNA
cccccgactctggctttcccccaggtctacatgttcctggtgaaatggcaggacctgtcggagaaggtggtctaccggc

SEQ ID NO: 32261 - RNA, 79 nt, synthetic construct
  source 1..79: mol_type = other RNA
cccccgactctggctttcccccaggtgtacatgttcctggtgaaatggcaggacctgtcggagaaggtggtctaccggc

SEQ ID NO: 32262 - RNA, 79 nt, synthetic construct
  source 1..79: mol_type = other RNA
cccccgactctggctttcccccaggtttacatgttcctggtgaaatggcaggacctgtcggagaaggtggtctaccggc

SEQ ID NO: 32263 - RNA, 79 nt, synthetic construct
  source 1..79: mol_type = other RNA
cccccgactctggctttcccccaggtttacatgttcctggtgaaatggcaggacctgtcggagaaggtggtctatcggc

SEQ ID NO: 32264 - RNA, 79 nt, synthetic construct
  source 1..79: mol_type = other RNA
cccccgactctggctttcccccaggtctacatgttcctggtgaaatggcaggacctgtcggagaaggtggtctatcggc

SEQ ID NO: 32265 - RNA, 79 nt, synthetic construct
  source 1..79: mol_type = other RNA
cccccgactctggctttcccccaggtatacatgttcctggtgaaatggcaggacctgtcggagaaggtggtctaccggc

SEQ ID NO: 32266 - RNA, 80 nt, synthetic construct
  source 1..80: mol_type = other RNA
tcccccgactctggctttcccccaggtgtacatgttcctggtgaaatggcaggacctgtcggagaaggtggtctaccggc

SEQ ID NO: 32267 - RNA, 80 nt, synthetic construct
  source 1..80: mol_type = other RNA
tcccccgactctggctttcccccaggtgtacatgttcctggtgaaatggcaggacctgtcggagaaggtggtctatcggc

SEQ ID NO: 32268 - RNA, 80 nt, synthetic construct
  source 1..80: mol_type = other RNA
tcccccgactctggctttcccccaggtttacatgttcctggtgaaatggcaggacctgtcggagaaggtggtctatcggc

SEQ ID NO: 32269 - RNA, 80 nt, synthetic construct
  source 1..80: mol_type = other RNA
tcccccgactctggctttcccccaggtttacatgttcctggtgaaatggcaggacctgtcggagaaggtggtctaccggc

SEQ ID NO: 32270 - RNA, 80 nt, synthetic construct
  source 1..80: mol_type = other RNA
tcccccgactctggctttcccccaggtatacatgttcctggtgaaatggcaggacctgtcggagaaggtggtctaccggc

SEQ ID NO: 32271 - RNA, 80 nt, synthetic construct
  source 1..80: mol_type = other RNA
tcccccgactctggctttcccccaggtctacatgttcctggtgaaatggcaggacctgtcggagaaggtggtctatcggc

SEQ ID NO: 32272 - RNA, 80 nt, synthetic construct
  source 1..80: mol_type = other RNA
tcccccgactctggctttcccccaggtatacatgttcctggtgaaatggcaggacctgtcggagaaggtggtctatcggc

SEQ ID NO: 32273 - RNA, 80 nt, synthetic construct
  source 1..80: mol_type = other RNA
tcccccgactctggctttcccccaggtctacatgttcctggtgaaatggcaggacctgtcggagaaggtggtctaccggc

SEQ ID NO: 32274 - RNA, 81 nt, synthetic construct
  source 1..81: mol_type = other RNA
gtcccccgactctggctttcccccaggtttacatgttcctggtgaaatggcaggacctgtcggagaaggtggtctatcggc

SEQ ID NO: 32275 - RNA, 81 nt, synthetic construct
  source 1..81: mol_type = other RNA
gtcccccgactctggctttcccccaggtttacatgttcctggtgaaatggcaggacctgtcggagaaggtggtctaccggc

SEQ ID NO: 32276 - RNA, 81 nt, synthetic construct
  source 1..81: mol_type = other RNA
gtcccccgactctggctttcccccaggtgtacatgttcctggtgaaatggcaggacctgtcggagaaggtggtctatcggc

SEQ ID NO: 32277 - RNA, 81 nt, synthetic construct
  source 1..81: mol_type = other RNA
gtcccccgactctggctttcccccaggtgtacatgttcctggtgaaatggcaggacctgtcggagaaggtggtctaccggc

SEQ ID NO: 32278 - RNA, 81 nt, synthetic construct
  source 1..81: mol_type = other RNA
gtcccccgactctggctttcccccaggtctacatgttcctggtgaaatggcaggacctgtcggagaaggtggtctatcggc

SEQ ID NO: 32279 - RNA, 81 nt, synthetic construct
  source 1..81: mol_type = other RNA
gtcccccgactctggctttcccccaggtatacatgttcctggtgaaatggcaggacctgtcggagaaggtggtctatcggc

SEQ ID NO: 32280 - RNA, 81 nt, synthetic construct
  source 1..81: mol_type = other RNA
gtcccccgactctggctttcccccaggtctacatgttcctggtgaaatggcaggacctgtcggagaaggtggtctaccggc

SEQ ID NO: 32281 - RNA, 81 nt, synthetic construct
  source 1..81: mol_type = other RNA
gtcccccgactctggctttcccccaggtatacatgttcctggtgaaatggcaggacctgtcggagaaggtggtctaccggc

SEQ ID NO: 32282 - RNA, 82 nt, synthetic construct
  source 1..82: mol_type = other RNA
ggtcccccgactctggctttcccccaggtatacatgttcctggtgaaatggcaggacctgtcggagaaggtggtctaccggc

SEQ ID NO: 32283 - RNA, 82 nt, synthetic construct
  source 1..82: mol_type = other RNA
ggtcccccgactctggctttcccccaggtctacatgttcctggtgaaatggcaggacctgtcggagaaggtggtctaccggc

SEQ ID NO: 32284 - RNA, 82 nt, synthetic construct
  source 1..82: mol_type = other RNA
ggtcccccgactctggctttcccccaggtctacatgttcctggtgaaatggcaggacctgtcggagaaggtggtctatcggc

SEQ ID NO: 32285 - RNA, 82 nt, synthetic construct
  source 1..82: mol_type = other RNA
ggtcccccgactctggctttcccccaggtatacatgttcctggtgaaatggcaggacctgtcggagaaggtggtctatcggc

SEQ ID NO: 32286 - RNA, 82 nt, synthetic construct
  source 1..82: mol_type = other RNA
ggtcccccgactctggctttcccccaggtgtacatgttcctggtgaaatggcaggacctgtcggagaaggtggtctatcggc

SEQ ID NO: 32287 - RNA, 82 nt, synthetic construct
  source 1..82: mol_type = other RNA
ggtcccccgactctggctttcccccaggtttacatgttcctggtgaaatggcaggacctgtcggagaaggtggtctaccggc

SEQ ID NO: 32288 - RNA, 82 nt, synthetic construct
  source 1..82: mol_type = other RNA
ggtcccccgactctggctttcccccaggtttacatgttcctggtgaaatggcaggacctgtcggagaaggtggtctatcggc

SEQ ID NO: 32289 - RNA, 82 nt, synthetic construct
  source 1..82: mol_type = other RNA
ggtcccccgactctggctttcccccaggtgtacatgttcctggtgaaatggcaggacctgtcggagaaggtggtctaccggc

SEQ ID NO: 32290 - RNA, 83 nt, synthetic construct
  source 1..83: mol_type = other RNA
gggtcccccgactctggctttcccccaggtctacatgttcctggtgaaatggcaggacctgtcggagaaggtggtctatcggc

SEQ ID NO: 32291 - RNA, 83 nt, synthetic construct
  source 1..83: mol_type = other RNA
gggtcccccgactctggctttcccccaggtatacatgttcctggtgaaatggcaggacctgtcggagaaggtggtctatcggc

SEQ ID NO: 32292 - RNA, 83 nt, synthetic construct
  source 1..83: mol_type = other RNA
gggtcccccgactctggctttcccccaggtctacatgttcctggtgaaatggcaggacctgtcggagaaggtggtctaccggc

SEQ ID NO: 32293 - RNA, 83 nt, synthetic construct
  source 1..83: mol_type = other RNA
gggtcccccgactctggctttcccccaggtttacatgttcctggtgaaatggcaggacctgtcggagaaggtggtctaccggc

SEQ ID NO: 32294 - RNA, 83 nt, synthetic construct
  source 1..83: mol_type = other RNA
gggtcccccgactctggctttcccccaggtgtacatgttcctggtgaaatggcaggacctgtcggagaaggtggtctaccggc

SEQ ID NO: 32295 - RNA, 83 nt, synthetic construct
  source 1..83: mol_type = other RNA
gggtcccccgactctggctttcccccaggtttacatgttcctggtgaaatggcaggacctgtcggagaaggtggtctatcggc

SEQ ID NO: 32296 - RNA, 83 nt, synthetic construct
  source 1..83: mol_type = other RNA
gggtcccccgactctggctttcccccaggtgtacatgttcctggtgaaatggcaggacctgtcggagaaggtggtctatcggc

SEQ ID NO: 32297 - RNA, 83 nt, synthetic construct
  source 1..83: mol_type = other RNA
gggtcccccgactctggctttcccccaggtatacatgttcctggtgaaatggcaggacctgtcggagaaggtggtctaccggc

SEQ ID NO: 32298 - RNA, 84 nt, synthetic construct
  source 1..84: mol_type = other RNA
ggggtcccccgactctggctttcccccaggtttacatgttcctggtgaaatggcaggacctgtcggagaaggtggtctatcggc

SEQ ID NO: 32299 - RNA, 84 nt, synthetic construct
  source 1..84: mol_type = other RNA
ggggtcccccgactctggctttcccccaggtctacatgttcctggtgaaatggcaggacctgtcggagaaggtggtctaccggc

SEQ ID NO: 32300 - RNA, 84 nt, synthetic construct
  source 1..84: mol_type = other RNA
ggggtcccccgactctggctttcccccaggtttacatgttcctggtgaaatggcaggacctgtcggagaaggtggtctaccggc

SEQ ID NO: 32301 - RNA, 84 nt, synthetic construct
  source 1..84: mol_type = other RNA
ggggtcccccgactctggctttcccccaggtctacatgttcctggtgaaatggcaggacctgtcggagaaggtggtctatcggc

SEQ ID NO: 32302 - RNA, 84 nt, synthetic construct
  source 1..84: mol_type = other RNA
ggggtcccccgactctggctttcccccaggtatacatgttcctggtgaaatggcaggacctgtcggagaaggtggtctatcggc

SEQ ID NO: 32303 - RNA, 84 nt, synthetic construct
  source 1..84: mol_type = other RNA
ggggtcccccgactctggctttcccccaggtgtacatgttcctggtgaaatggcaggacctgtcggagaaggtggtctaccggc

SEQ ID NO: 32304 - RNA, 84 nt, synthetic construct
  source 1..84: mol_type = other RNA
ggggtcccccgactctggctttcccccaggtatacatgttcctggtgaaatggcaggacctgtcggagaaggtggtctaccggc

SEQ ID NO: 32305 - RNA, 84 nt, synthetic construct
  source 1..84: mol_type = other RNA
ggggtcccccgactctggctttcccccaggtgtacatgttcctggtgaaatggcaggacctgtcggagaaggtggtctatcggc

SEQ ID NO: 32306 - RNA, 85 nt, synthetic construct
  source 1..85: mol_type = other RNA
tggggtcccccgactctggctttcccccaggtttacatgttcctggtgaaatggcaggacctgtcggagaaggtggtctaccggc

SEQ ID NO: 32307 - RNA, 85 nt, synthetic construct
  source 1..85: mol_type = other RNA
tggggtcccccgactctggctttcccccaggtgtacatgttcctggtgaaatggcaggacctgtcggagaaggtggtctatcggc

SEQ ID NO: 32308 - RNA, 85 nt, synthetic construct
  source 1..85: mol_type = other RNA
tggggtcccccgactctggctttcccccaggtgtacatgttcctggtgaaatggcaggacctgtcggagaaggtggtctaccggc

SEQ ID NO: 32309 - RNA, 85 nt, synthetic construct
  source 1..85: mol_type = other RNA
tggggtcccccgactctggctttcccccaggtctacatgttcctggtgaaatggcaggacctgtcggagaaggtggtctatcggc

SEQ ID NO: 32310 - RNA, 85 nt, synthetic construct
  source 1..85: mol_type = other RNA
tggggtcccccgactctggctttcccccaggtctacatgttcctggtgaaatggcaggacctgtcggagaaggtggtctaccggc

SEQ ID NO: 32311 - RNA, 85 nt, synthetic construct
  source 1..85: mol_type = other RNA
tggggtcccccgactctggctttcccccaggtatacatgttcctggtgaaatggcaggacctgtcggagaaggtggtctatcggc

SEQ ID NO: 32312 - RNA, 85 nt, synthetic construct
  source 1..85: mol_type = other RNA
tggggtcccccgactctggctttcccccaggtatacatgttcctggtgaaatggcaggacctgtcggagaaggtggtctaccggc

SEQ ID NO: 32313 - RNA, 85 nt, synthetic construct
  source 1..85: mol_type = other RNA
tggggtcccccgactctggctttcccccaggtttacatgttcctggtgaaatggcaggacctgtcggagaaggtggtctatcggc

SEQ ID NO: 32314 - RNA, 86 nt, synthetic construct
  source 1..86: mol_type = other RNA
atggggtcccccgactctggctttcccccaggtttacatgttcctggtgaaatggcaggacctgtcggagaaggtggtctaccggc

SEQ ID NO: 32315 - RNA, 86 nt, synthetic construct
  source 1..86: mol_type = other RNA
atggggtcccccgactctggctttcccccaggtatacatgttcctggtgaaatggcaggacctgtcggagaaggtggtctatcggc

SEQ ID NO: 32316 - RNA, 86 nt, synthetic construct
  source 1..86: mol_type = other RNA
atggggtcccccgactctggctttcccccaggtttacatgttcctggtgaaatggcaggacctgtcggagaaggtggtctatcggc

SEQ ID NO: 32317 - RNA, 86 nt, synthetic construct
  source 1..86: mol_type = other RNA
atggggtcccccgactctggctttcccccaggtctacatgttcctggtgaaatggcaggacctgtcggagaaggtggtctaccggc

SEQ ID NO: 32318 - RNA, 86 nt, synthetic construct
  source 1..86: mol_type = other RNA
atggggtcccccgactctggctttcccccaggtatacatgttcctggtgaaatggcaggacctgtcggagaaggtggtctaccggc

SEQ ID NO: 32319 - RNA, 86 nt, synthetic construct
  source 1..86: mol_type = other RNA
atggggtcccccgactctggctttcccccaggtgtacatgttcctggtgaaatggcaggacctgtcggagaaggtggtctatcggc

SEQ ID NO: 32320 - RNA, 86 nt, synthetic construct
  source 1..86: mol_type = other RNA
atggggtcccccgactctggctttcccccaggtctacatgttcctggtgaaatggcaggacctgtcggagaaggtggtctatcggc

SEQ ID NO: 32321 - RNA, 86 nt, synthetic construct
  source 1..86: mol_type = other RNA
atggggtcccccgactctggctttcccccaggtgtacatgttcctggtgaaatggcaggacctgtcggagaaggtggtctaccggc

SEQ ID NO: 32322 - RNA, 87 nt, synthetic construct
  source 1..87: mol_type = other RNA
aatggggtcccccgactctggctttcccccaggtatacatgttcctggtgaaatggcaggacctgtcggagaaggtggtctaccggc

SEQ ID NO: 32323 - RNA, 87 nt, synthetic construct
  source 1..87: mol_type = other RNA
aatggggtcccccgactctggctttcccccaggtatacatgttcctggtgaaatggcaggacctgtcggagaaggtggtctatcggc

SEQ ID NO: 32324 - RNA, 87 nt, synthetic construct
  source 1..87: mol_type = other RNA
aatggggtcccccgactctggctttcccccaggtctacatgttcctggtgaaatggcaggacctgtcggagaaggtggtctatcggc

SEQ ID NO: 32325 - RNA, 87 nt, synthetic construct
  source 1..87: mol_type = other RNA
aatggggtcccccgactctggctttcccccaggtttacatgttcctggtgaaatggcaggacctgtcggagaaggtggtctaccggc

SEQ ID NO: 32326 - RNA, 87 nt, synthetic construct
  source 1..87: mol_type = other RNA
aatggggtcccccgactctggctttcccccaggtttacatgttcctggtgaaatggcaggacctgtcggagaaggtggtctatcggc

SEQ ID NO: 32327 - RNA, 87 nt, synthetic construct
  source 1..87: mol_type = other RNA
aatggggtcccccgactctggctttcccccaggtgtacatgttcctggtgaaatggcaggacctgtcggagaaggtggtctaccggc

SEQ ID NO: 32328 - RNA, 87 nt, synthetic construct
  source 1..87: mol_type = other RNA
aatggggtcccccgactctggctttcccccaggtctacatgttcctggtgaaatggcaggacctgtcggagaaggtggtctaccggc

SEQ ID NO: 32329 - RNA, 87 nt, synthetic construct
  source 1..87: mol_type = other RNA
aatggggtcccccgactctggctttcccccaggtgtacatgttcctggtgaaatggcaggacctgtcggagaaggtggtctatcggc

SEQ ID NO: 32330 - RNA, 88 nt, synthetic construct
  source 1..88: mol_type = other RNA
gaatggggtcccccgactctggctttcccccaggtatacatgttcctggtgaaatggcaggacctgtcggagaaggtggtctaccggc

SEQ ID NO: 32331 - RNA, 88 nt, synthetic construct
  source 1..88: mol_type = other RNA
gaatggggtcccccgactctggctttcccccaggtgtacatgttcctggtgaaatggcaggacctgtcggagaaggtggtctaccggc

SEQ ID NO: 32332 - RNA, 88 nt, synthetic construct
  source 1..88: mol_type = other RNA
gaatggggtcccccgactctggctttcccccaggtttacatgttcctggtgaaatggcaggacctgtcggagaaggtggtctatcggc

SEQ ID NO: 32333 - RNA, 88 nt, synthetic construct
  source 1..88: mol_type = other RNA
gaatggggtcccccgactctggctttcccccaggtttacatgttcctggtgaaatggcaggacctgtcggagaaggtggtctaccggc

SEQ ID NO: 32334 - RNA, 88 nt, synthetic construct
  source 1..88: mol_type = other RNA
gaatggggtcccccgactctggctttcccccaggtctacatgttcctggtgaaatggcaggacctgtcggagaaggtggtctatcggc

SEQ ID NO: 32335 - RNA, 88 nt, synthetic construct
  source 1..88: mol_type = other RNA
gaatggggtcccccgactctggctttcccccaggtctacatgttcctggtgaaatggcaggacctgtcggagaaggtggtctaccggc

SEQ ID NO: 32336 - RNA, 88 nt, synthetic construct
  source 1..88: mol_type = other RNA
gaatggggtcccccgactctggctttcccccaggtgtacatgttcctggtgaaatggcaggacctgtcggagaaggtggtctatcggc

SEQ ID NO: 32337 - RNA, 88 nt, synthetic construct
  source 1..88: mol_type = other RNA
gaatggggtcccccgactctggctttcccccaggtatacatgttcctggtgaaatggcaggacctgtcggagaaggtggtctatcggc

SEQ ID NO: 32338 - RNA, 89 nt, synthetic construct
  source 1..89: mol_type = other RNA
tgaatggggtcccccgactctggctttcccccaggtctacatgttcctggtgaaatggcaggacctgtcggagaaggtggtctatcggc

SEQ ID NO: 32339 - RNA, 89 nt, synthetic construct
  source 1..89: mol_type = other RNA
tgaatggggtcccccgactctggctttcccccaggtgtacatgttcctggtgaaatggcaggacctgtcggagaaggtggtctatcggc

SEQ ID NO: 32340 - RNA, 89 nt, synthetic construct
  source 1..89: mol_type = other RNA
tgaatggggtcccccgactctggctttcccccaggtgtacatgttcctggtgaaatggcaggacctgtcggagaaggtggtctaccggc

SEQ ID NO: 32341 - RNA, 89 nt, synthetic construct
  source 1..89: mol_type = other RNA
tgaatggggtcccccgactctggctttcccccaggtttacatgttcctggtgaaatggcaggacctgtcggagaaggtggtctaccggc

SEQ ID NO: 32342 - RNA, 89 nt, synthetic construct
  source 1..89: mol_type = other RNA
tgaatggggtcccccgactctggctttcccccaggtctacatgttcctggtgaaatggcaggacctgtcggagaaggtggtctaccggc

SEQ ID NO: 32343 - RNA, 89 nt, synthetic construct
  source 1..89: mol_type = other RNA
tgaatggggtcccccgactctggctttcccccaggtatacatgttcctggtgaaatggcaggacctgtcggagaaggtggtctatcggc

SEQ ID NO: 32344 - RNA, 89 nt, synthetic construct
  source 1..89: mol_type = other RNA
tgaatggggtcccccgactctggctttcccccaggtttacatgttcctggtgaaatggcaggacctgtcggagaaggtggtctatcggc

SEQ ID NO: 32345 - RNA, 89 nt, synthetic construct
  source 1..89: mol_type = other RNA
tgaatggggtcccccgactctggctttcccccaggtatacatgttcctggtgaaatggcaggacctgtcggagaaggtggtctaccggc

SEQ ID NO: 32346 - RNA, 90 nt, synthetic construct
  source 1..90: mol_type = other RNA
ctgaatggggtcccccgactctggctttcccccaggtatacatgttcctggtgaaatggcaggacctgtcggagaaggtggtctaccggc

SEQ ID NO: 32347 - RNA, 90 nt, synthetic construct
  source 1..90: mol_type = other RNA
ctgaatggggtcccccgactctggctttcccccaggtatacatgttcctggtgaaatggcaggacctgtcggagaaggtggtctatcggc

SEQ ID NO: 32348 - RNA, 90 nt, synthetic construct
  source 1..90: mol_type = other RNA
ctgaatggggtcccccgactctggctttcccccaggtctacatgttcctggtgaaatggcaggacctgtcggagaaggtggtctaccggc

SEQ ID NO: 32349 - RNA, 90 nt, synthetic construct
  source 1..90: mol_type = other RNA
ctgaatggggtcccccgactctggctttcccccaggtgtacatgttcctggtgaaatggcaggacctgtcggagaaggtggtctatcggc

SEQ ID NO: 32350 - RNA, 90 nt, synthetic construct
  source 1..90: mol_type = other RNA
ctgaatggggtcccccgactctggctttcccccaggtctacatgttcctggtgaaatggcaggacctgtcggagaaggtggtctatcggc

SEQ ID NO: 32351 - RNA, 90 nt, synthetic construct
  source 1..90: mol_type = other RNA
ctgaatggggtcccccgactctggctttcccccaggtgtacatgttcctggtgaaatggcaggacctgtcggagaaggtggtctaccggc

SEQ ID NO: 32352 - RNA, 90 nt, synthetic construct
  source 1..90: mol_type = other RNA
ctgaatggggtcccccgactctggctttcccccaggtttacatgttcctggtgaaatggcaggacctgtcggagaaggtggtctaccggc

SEQ ID NO: 32353 - RNA, 90 nt, synthetic construct
  source 1..90: mol_type = other RNA
ctgaatggggtcccccgactctggctttcccccaggtttacatgttcctggtgaaatggcaggacctgtcggagaaggtggtctatcggc

SEQ ID NO: 32354 - RNA, 91 nt, synthetic construct
  source 1..91: mol_type = other RNA
gctgaatggggtcccccgactctggctttcccccaggtctacatgttcctggtgaaatggcaggacctgtcggagaaggtggtctaccggc

SEQ ID NO: 32355 - RNA, 91 nt, synthetic construct
  source 1..91: mol_type = other RNA
gctgaatggggtcccccgactctggctttcccccaggtctacatgttcctggtgaaatggcaggacctgtcggagaaggtggtctatcggc

SEQ ID NO: 32356 - RNA, 91 nt, synthetic construct
  source 1..91: mol_type = other RNA
gctgaatggggtcccccgactctggctttcccccaggtgtacatgttcctggtgaaatggcaggacctgtcggagaaggtggtctaccggc

SEQ ID NO: 32357 - RNA, 91 nt, synthetic construct
  source 1..91: mol_type = other RNA
gctgaatggggtcccccgactctggctttcccccaggtttacatgttcctggtgaaatggcaggacctgtcggagaaggtggtctaccggc

SEQ ID NO: 32358 - RNA, 91 nt, synthetic construct
  source 1..91: mol_type = other RNA
gctgaatggggtcccccgactctggctttcccccaggtatacatgttcctggtgaaatggcaggacctgtcggagaaggtggtctatcggc

SEQ ID NO: 32359 - RNA, 91 nt, synthetic construct
  source 1..91: mol_type = other RNA
gctgaatggggtcccccgactctggctttcccccaggtgtacatgttcctggtgaaatggcaggacctgtcggagaaggtggtctatcggc

SEQ ID NO: 32360 - RNA, 91 nt, synthetic construct
  source 1..91: mol_type = other RNA
gctgaatggggtcccccgactctggctttcccccaggtatacatgttcctggtgaaatggcaggacctgtcggagaaggtggtctaccggc

SEQ ID NO: 32361 - RNA, 91 nt, synthetic construct
  source 1..91: mol_type = other RNA
gctgaatggggtcccccgactctggctttcccccaggtttacatgttcctggtgaaatggcaggacctgtcggagaaggtggtctatcggc

SEQ ID NO: 32362 - RNA, 92 nt, synthetic construct
  source 1..92: mol_type = other RNA
ggctgaatggggtcccccgactctggctttcccccaggtatacatgttcctggtgaaatggcaggacctgtcggagaaggtggtctaccggc

SEQ ID NO: 32363 - RNA, 92 nt, synthetic construct
  source 1..92: mol_type = other RNA
ggctgaatggggtcccccgactctggctttcccccaggtatacatgttcctggtgaaatggcaggacctgtcggagaaggtggtctatcggc

SEQ ID NO: 32364 - RNA, 92 nt, synthetic construct
  source 1..92: mol_type = other RNA
ggctgaatggggtcccccgactctggctttcccccaggtctacatgttcctggtgaaatggcaggacctgtcggagaaggtggtctaccggc

SEQ ID NO: 32365 - RNA, 92 nt, synthetic construct
  source 1..92: mol_type = other RNA
ggctgaatggggtcccccgactctggctttcccccaggtgtacatgttcctggtgaaatggcaggacctgtcggagaaggtggtctaccggc

SEQ ID NO: 32366 - RNA, 92 nt, synthetic construct
  source 1..92: mol_type = other RNA
ggctgaatggggtcccccgactctggctttcccccaggtttacatgttcctggtgaaatggcaggacctgtcggagaaggtggtctaccggc

SEQ ID NO: 32367 - RNA, 92 nt, synthetic construct
  source 1..92: mol_type = other RNA
ggctgaatggggtcccccgactctggctttcccccaggtttacatgttcctggtgaaatggcaggacctgtcggagaaggtggtctatcggc

SEQ ID NO: 32368 - RNA, 92 nt, synthetic construct
  source 1..92: mol_type = other RNA
ggctgaatggggtcccccgactctggctttcccccaggtgtacatgttcctggtgaaatggcaggacctgtcggagaaggtggtctatcggc

SEQ ID NO: 32369 - RNA, 92 nt, synthetic construct
  source 1..92: mol_type = other RNA
ggctgaatggggtcccccgactctggctttcccccaggtctacatgttcctggtgaaatggcaggacctgtcggagaaggtggtctatcggc

SEQ ID NO: 32370 - RNA, 93 nt, synthetic construct
  source 1..93: mol_type = other RNA
aggctgaatggggtcccccgactctggctttcccccaggtgtacatgttcctggtgaaatggcaggacctgtcggagaaggtggtctatcggc

SEQ ID NO: 32371 - RNA, 93 nt, synthetic construct
  source 1..93: mol_type = other RNA
aggctgaatggggtcccccgactctggctttcccccaggtttacatgttcctggtgaaatggcaggacctgtcggagaaggtggtctaccggc

SEQ ID NO: 32372 - RNA, 93 nt, synthetic construct
  source 1..93: mol_type = other RNA
aggctgaatggggtcccccgactctggctttcccccaggtttacatgttcctggtgaaatggcaggacctgtcggagaaggtggtctatcggc

SEQ ID NO: 32373 - RNA, 93 nt, synthetic construct
  source 1..93: mol_type = other RNA
aggctgaatggggtcccccgactctggctttcccccaggtctacatgttcctggtgaaatggcaggacctgtcggagaaggtggtctatcggc

SEQ ID NO: 32374 - RNA, 93 nt, synthetic construct
  source 1..93: mol_type = other RNA
aggctgaatggggtcccccgactctggctttcccccaggtatacatgttcctggtgaaatggcaggacctgtcggagaaggtggtctatcggc

SEQ ID NO: 32375 - RNA, 93 nt, synthetic construct
  source 1..93: mol_type = other RNA
aggctgaatggggtcccccgactctggctttcccccaggtctacatgttcctggtgaaatggcaggacctgtcggagaaggtggtctaccggc

SEQ ID NO: 32376 - RNA, 93 nt, synthetic construct
  source 1..93: mol_type = other RNA
aggctgaatggggtcccccgactctggctttcccccaggtgtacatgttcctggtgaaatggcaggacctgtcggagaaggtggtctaccggc

SEQ ID NO: 32377 - RNA, 93 nt, synthetic construct
  source 1..93: mol_type = other RNA
aggctgaatggggtcccccgactctggctttcccccaggtatacatgttcctggtgaaatggcaggacctgtcggagaaggtggtctaccggc

SEQ ID NO: 32378 - RNA, 94 nt, synthetic construct
  source 1..94: mol_type = other RNA
gaggctgaatggggtcccccgactctggctttcccccaggtttacatgttcctggtgaaatggcaggacctgtcggagaaggtggtctatcggc

SEQ ID NO: 32379 - RNA, 94 nt, synthetic construct
  source 1..94: mol_type = other RNA
gaggctgaatggggtcccccgactctggctttcccccaggtgtacatgttcctggtgaaatggcaggacctgtcggagaaggtggtctaccggc

SEQ ID NO: 32380 - RNA, 94 nt, synthetic construct
  source 1..94: mol_type = other RNA
gaggctgaatggggtcccccgactctggctttcccccaggtgtacatgttcctggtgaaatggcaggacctgtcggagaaggtggtctatcggc

SEQ ID NO: 32381 - RNA, 94 nt, synthetic construct
  source 1..94: mol_type = other RNA
gaggctgaatggggtcccccgactctggctttcccccaggtctacatgttcctggtgaaatggcaggacctgtcggagaaggtggtctatcggc

SEQ ID NO: 32382 - RNA, 94 nt, synthetic construct
  source 1..94: mol_type = other RNA
gaggctgaatggggtcccccgactctggctttcccccaggtctacatgttcctggtgaaatggcaggacctgtcggagaaggtggtctaccggc

SEQ ID NO: 32383 - RNA, 94 nt, synthetic construct
  source 1..94: mol_type = other RNA
gaggctgaatggggtcccccgactctggctttcccccaggtatacatgttcctggtgaaatggcaggacctgtcggagaaggtggtctatcggc

SEQ ID NO: 32384 - RNA, 94 nt, synthetic construct
  source 1..94: mol_type = other RNA
gaggctgaatggggtcccccgactctggctttcccccaggtatacatgttcctggtgaaatggcaggacctgtcggagaaggtggtctaccggc

SEQ ID NO: 32385 - RNA, 94 nt, synthetic construct
  source 1..94: mol_type = other RNA
gaggctgaatggggtcccccgactctggctttcccccaggtttacatgttcctggtgaaatggcaggacctgtcggagaaggtggtctaccggc

SEQ ID NO: 32386 - RNA, 95 nt, synthetic construct
  source 1..95: mol_type = other RNA
ggaggctgaatggggtcccccgactctggctttcccccaggtatacatgttcctggtgaaatggcaggacctgtcggagaaggtggtctaccggc

SEQ ID NO: 32387 - RNA, 95 nt, synthetic construct
  source 1..95: mol_type = other RNA
ggaggctgaatggggtcccccgactctggctttcccccaggtatacatgttcctggtgaaatggcaggacctgtcggagaaggtggtctatcggc

SEQ ID NO: 32388 - RNA, 95 nt, synthetic construct
  source 1..95: mol_type = other RNA
ggaggctgaatggggtcccccgactctggctttcccccaggtctacatgttcctggtgaaatggcaggacctgtcggagaaggtggtctaccggc

SEQ ID NO: 32389 - RNA, 95 nt, synthetic construct
  source 1..95: mol_type = other RNA
ggaggctgaatggggtcccccgactctggctttcccccaggtctacatgttcctggtgaaatggcaggacctgtcggagaaggtggtctatcggc

SEQ ID NO: 32390 - RNA, 95 nt, synthetic construct
  source 1..95: mol_type = other RNA
ggaggctgaatggggtcccccgactctggctttcccccaggtgtacatgttcctggtgaaatggcaggacctgtcggagaaggtggtctaccggc

SEQ ID NO: 32391 - RNA, 95 nt, synthetic construct
  source 1..95: mol_type = other RNA
ggaggctgaatggggtcccccgactctggctttcccccaggtgtacatgttcctggtgaaatggcaggacctgtcggagaaggtggtctatcggc

SEQ ID NO: 32392 - RNA, 95 nt, synthetic construct
  source 1..95: mol_type = other RNA
ggaggctgaatggggtcccccgactctggctttcccccaggtttacatgttcctggtgaaatggcaggacctgtcggagaaggtggtctaccggc

SEQ ID NO: 32393 - RNA, 95 nt, synthetic construct
  source 1..95: mol_type = other RNA
ggaggctgaatggggtcccccgactctggctttcccccaggtttacatgttcctggtgaaatggcaggacctgtcggagaaggtggtctatcggc

SEQ ID NO: 32394 - RNA, 96 nt, synthetic construct
  source 1..96: mol_type = other RNA
tggaggctgaatggggtcccccgactctggctttcccccaggtgtacatgttcctggtgaaatggcaggacctgtcggagaaggtggtctatcggc

SEQ ID NO: 32395 - RNA, 96 nt, synthetic construct
  source 1..96: mol_type = other RNA
tggaggctgaatggggtcccccgactctggctttcccccaggtatacatgttcctggtgaaatggcaggacctgtcggagaaggtggtctaccggc

SEQ ID NO: 32396 - RNA, 96 nt, synthetic construct
  source 1..96: mol_type = other RNA
tggaggctgaatggggtcccccgactctggctttcccccaggtgtacatgttcctggtgaaatggcaggacctgtcggagaaggtggtctaccggc

SEQ ID NO: 32397 - RNA, 96 nt, synthetic construct
  source 1..96: mol_type = other RNA
tggaggctgaatggggtcccccgactctggctttcccccaggtctacatgttcctggtgaaatggcaggacctgtcggagaaggtggtctatcggc

SEQ ID NO: 32398 - RNA, 96 nt, synthetic construct
  source 1..96: mol_type = other RNA
tggaggctgaatggggtcccccgactctggctttcccccaggtctacatgttcctggtgaaatggcaggacctgtcggagaaggtggtctaccggc

SEQ ID NO: 32399 - RNA, 96 nt, synthetic construct
  source 1..96: mol_type = other RNA
tggaggctgaatggggtcccccgactctggctttcccccaggtatacatgttcctggtgaaatggcaggacctgtcggagaaggtggtctatcggc

SEQ ID NO: 32400 - RNA, 96 nt, synthetic construct
  source 1..96: mol_type = other RNA
tggaggctgaatggggtcccccgactctggctttcccccaggtttacatgttcctggtgaaatggcaggacctgtcggagaaggtggtctaccggc

SEQ ID NO: 32401 - RNA, 96 nt, synthetic construct
  source 1..96: mol_type = other RNA
tggaggctgaatggggtcccccgactctggctttcccccaggtttacatgttcctggtgaaatggcaggacctgtcggagaaggtggtctatcggc

SEQ ID NO: 32402 - RNA, 97 nt, synthetic construct
  source 1..97: mol_type = other RNA
ttggaggctgaatggggtcccccgactctggctttcccccaggtttacatgttcctggtgaaatggcaggacctgtcggagaaggtggtctatcggc

SEQ ID NO: 32403 - RNA, 97 nt, synthetic construct
  source 1..97: mol_type = other RNA
ttggaggctgaatggggtcccccgactctggctttcccccaggtctacatgttcctggtgaaatggcaggacctgtcggagaaggtggtctatcggc

SEQ ID NO: 32404 - RNA, 97 nt, synthetic construct
  source 1..97: mol_type = other RNA
ttggaggctgaatggggtcccccgactctggctttcccccaggtgtacatgttcctggtgaaatggcaggacctgtcggagaaggtggtctatcggc

SEQ ID NO: 32405 - RNA, 97 nt, synthetic construct
  source 1..97: mol_type = other RNA
ttggaggctgaatggggtcccccgactctggctttcccccaggtttacatgttcctggtgaaatggcaggacctgtcggagaaggtggtctaccggc

SEQ ID NO: 32406 - RNA, 97 nt, synthetic construct
  source 1..97: mol_type = other RNA
ttggaggctgaatggggtcccccgactctggctttcccccaggtatacatgttcctggtgaaatggcaggacctgtcggagaaggtggtctatcggc

SEQ ID NO: 32407 - RNA, 97 nt, synthetic construct
  source 1..97: mol_type = other RNA
ttggaggctgaatggggtcccccgactctggctttcccccaggtatacatgttcctggtgaaatggcaggacctgtcggagaaggtggtctaccggc

SEQ ID NO: 32408 - RNA, 97 nt, synthetic construct
  source 1..97: mol_type = other RNA
ttggaggctgaatggggtcccccgactctggctttcccccaggtctacatgttcctggtgaaatggcaggacctgtcggagaaggtggtctaccggc

SEQ ID NO: 32409 - RNA, 97 nt, synthetic construct
  source 1..97: mol_type = other RNA
ttggaggctgaatggggtcccccgactctggctttcccccaggtgtacatgttcctggtgaaatggcaggacctgtcggagaaggtggtctaccggc

SEQ ID NO: 32410 - RNA, 98 nt, synthetic construct
  source 1..98: mol_type = other RNA
tttggaggctgaatggggtcccccgactctggctttcccccaggtttacatgttcctggtgaaatggcaggacctgtcggagaaggtggtctaccggc

SEQ ID NO: 32411 - RNA, 98 nt, synthetic construct
  source 1..98: mol_type = other RNA
tttggaggctgaatggggtcccccgactctggctttcccccaggtttacatgttcctggtgaaatggcaggacctgtcggagaaggtggtctatcggc

SEQ ID NO: 32412 - RNA, 98 nt, synthetic construct
  source 1..98: mol_type = other RNA
tttggaggctgaatggggtcccccgactctggctttcccccaggtctacatgttcctggtgaaatggcaggacctgtcggagaaggtggtctaccggc

SEQ ID NO: 32413 - RNA, 98 nt, synthetic construct
  source 1..98: mol_type = other RNA
tttggaggctgaatggggtcccccgactctggctttcccccaggtatacatgttcctggtgaaatggcaggacctgtcggagaaggtggtctatcggc

SEQ ID NO: 32414 - RNA, 98 nt, synthetic construct
  source 1..98: mol_type = other RNA
tttggaggctgaatggggtcccccgactctggctttcccccaggtatacatgttcctggtgaaatggcaggacctgtcggagaaggtggtctaccggc

SEQ ID NO: 32415 - RNA, 98 nt, synthetic construct
  source 1..98: mol_type = other RNA
tttggaggctgaatggggtcccccgactctggctttcccccaggtgtacatgttcctggtgaaatggcaggacctgtcggagaaggtggtctatcggc

SEQ ID NO: 32416 - RNA, 98 nt, synthetic construct
  source 1..98: mol_type = other RNA
tttggaggctgaatggggtcccccgactctggctttcccccaggtctacatgttcctggtgaaatggcaggacctgtcggagaaggtggtctatcggc

SEQ ID NO: 32417 - RNA, 98 nt, synthetic construct
  source 1..98: mol_type = other RNA
tttggaggctgaatggggtcccccgactctggctttcccccaggtgtacatgttcctggtgaaatggcaggacctgtcggagaaggtggtctaccggc

SEQ ID NO: 32418 - RNA, 99 nt, synthetic construct
  source 1..99: mol_type = other RNA
ctttggaggctgaatggggtcccccgactctggctttcccccaggtctacatgttcctggtgaaatggcaggacctgtcggagaaggtggtctatcggc

SEQ ID NO: 32419 - RNA, 99 nt, synthetic construct
  source 1..99: mol_type = other RNA
ctttggaggctgaatggggtcccccgactctggctttcccccaggtatacatgttcctggtgaaatggcaggacctgtcggagaaggtggtctaccggc

SEQ ID NO: 32420 - RNA, 99 nt, synthetic construct
  source 1..99: mol_type = other RNA
ctttggaggctgaatggggtcccccgactctggctttcccccaggtgtacatgttcctggtgaaatggcaggacctgtcggagaaggtggtctaccggc

SEQ ID NO: 32421 - RNA, 99 nt, synthetic construct
  source 1..99: mol_type = other RNA
ctttggaggctgaatggggtcccccgactctggctttcccccaggtgtacatgttcctggtgaaatggcaggacctgtcggagaaggtggtctatcggc

SEQ ID NO: 32422 - RNA, 99 nt, synthetic construct
  source 1..99: mol_type = other RNA
ctttggaggctgaatggggtcccccgactctggctttcccccaggtttacatgttcctggtgaaatggcaggacctgtcggagaaggtggtctaccggc

SEQ ID NO: 32423 - RNA, 99 nt, synthetic construct
  source 1..99: mol_type = other RNA
ctttggaggctgaatggggtcccccgactctggctttcccccaggtctacatgttcctggtgaaatggcaggacctgtcggagaaggtggtctaccggc

SEQ ID NO: 32424 - RNA, 99 nt, synthetic construct
  source 1..99: mol_type = other RNA
ctttggaggctgaatggggtcccccgactctggctttcccccaggtatacatgttcctggtgaaatggcaggacctgtcggagaaggtggtctatcggc

SEQ ID NO: 32425 - RNA, 99 nt, synthetic construct
  source 1..99: mol_type = other RNA
ctttggaggctgaatggggtcccccgactctggctttcccccaggtttacatgttcctggtgaaatggcaggacctgtcggagaaggtggtctatcggc

SEQ ID NO: 32426 - RNA, 100 nt, synthetic construct
  source 1..100: mol_type = other RNA
tctttggaggctgaatggggtcccccgactctggctttcccccaggtttacatgttcctggtgaaatggcaggacctgtcggagaaggtggtctaccggc

SEQ ID NO: 32427 - RNA, 100 nt, synthetic construct
  source 1..100: mol_type = other RNA
tctttggaggctgaatggggtcccccgactctggctttcccccaggtctacatgttcctggtgaaatggcaggacctgtcggagaaggtggtctatcggc

SEQ ID NO: 32428 - RNA, 100 nt, synthetic construct
  source 1..100: mol_type = other RNA
tctttggaggctgaatggggtcccccgactctggctttcccccaggtgtacatgttcctggtgaaatggcaggacctgtcggagaaggtggtctatcggc

SEQ ID NO: 32429 - RNA, 100 nt, synthetic construct
  source 1..100: mol_type = other RNA
tctttggaggctgaatggggtcccccgactctggctttcccccaggtgtacatgttcctggtgaaatggcaggacctgtcggagaaggtggtctaccggc

SEQ ID NO: 32430 - RNA, 100 nt, synthetic construct
  source 1..100: mol_type = other RNA
tctttggaggctgaatggggtcccccgactctggctttcccccaggtctacatgttcctggtgaaatggcaggacctgtcggagaaggtggtctaccggc

SEQ ID NO: 32431 - RNA, 100 nt, synthetic construct
  source 1..100: mol_type = other RNA
tctttggaggctgaatggggtcccccgactctggctttcccccaggtttacatgttcctggtgaaatggcaggacctgtcggagaaggtggtctatcggc

SEQ ID NO: 32432 - RNA, 100 nt, synthetic construct
  source 1..100: mol_type = other RNA
tctttggaggctgaatggggtcccccgactctggctttcccccaggtatacatgttcctggtgaaatggcaggacctgtcggagaaggtggtctaccggc

SEQ ID NO: 32433 - RNA, 100 nt, synthetic construct
  source 1..100: mol_type = other RNA
tctttggaggctgaatggggtcccccgactctggctttcccccaggtatacatgttcctggtgaaatggcaggacctgtcggagaaggtggtctatcggc

SEQ ID NO: 32434 - RNA, 101 nt, synthetic construct
  source 1..101: mol_type = other RNA
ctctttggaggctgaatggggtcccccgactctggctttcccccaggtgtacatgttcctggtgaaatggcaggacctgtcggagaaggtggtctaccggc

SEQ ID NO: 32435 - RNA, 101 nt, synthetic construct
  source 1..101: mol_type = other RNA
ctctttggaggctgaatggggtcccccgactctggctttcccccaggtttacatgttcctggtgaaatggcaggacctgtcggagaaggtggtctaccggc

SEQ ID NO: 32436 - RNA, 101 nt, synthetic construct
  source 1..101: mol_type = other RNA
ctctttggaggctgaatggggtcccccgactctggctttcccccaggtgtacatgttcctggtgaaatggcaggacctgtcggagaaggtggtctatcggc

SEQ ID NO: 32437 - RNA, 101 nt, synthetic construct
  source 1..101: mol_type = other RNA
ctctttggaggctgaatggggtcccccgactctggctttcccccaggtttacatgttcctggtgaaatggcaggacctgtcggagaaggtggtctatcggc

SEQ ID NO: 32438 - RNA, 101 nt, synthetic construct
  source 1..101: mol_type = other RNA
ctctttggaggctgaatggggtcccccgactctggctttcccccaggtctacatgttcctggtgaaatggcaggacctgtcggagaaggtggtctaccggc

SEQ ID NO: 32439 - RNA, 101 nt, synthetic construct
  source 1..101: mol_type = other RNA
ctctttggaggctgaatggggtcccccgactctggctttcccccaggtatacatgttcctggtgaaatggcaggacctgtcggagaaggtggtctatcggc

SEQ ID NO: 32440 - RNA, 101 nt, synthetic construct
  source 1..101: mol_type = other RNA
ctctttggaggctgaatggggtcccccgactctggctttcccccaggtatacatgttcctggtgaaatggcaggacctgtcggagaaggtggtctaccggc

SEQ ID NO: 32441 - RNA, 101 nt, synthetic construct
  source 1..101: mol_type = other RNA
ctctttggaggctgaatggggtcccccgactctggctttcccccaggtctacatgttcctggtgaaatggcaggacctgtcggagaaggtggtctatcggc

SEQ ID NO: 32442 - RNA, 102 nt, synthetic construct
  source 1..102: mol_type = other RNA
cctctttggaggctgaatggggtcccccgactctggctttcccccaggtctacatgttcctggtgaaatggcaggacctgtcggagaaggtggtctatcggc

SEQ ID NO: 32443 - RNA, 102 nt, synthetic construct
  source 1..102: mol_type = other RNA
cctctttggaggctgaatggggtcccccgactctggctttcccccaggtatacatgttcctggtgaaatggcaggacctgtcggagaaggtggtctaccggc

SEQ ID NO: 32444 - RNA, 102 nt, synthetic construct
  source 1..102: mol_type = other RNA
cctctttggaggctgaatggggtcccccgactctggctttcccccaggtctacatgttcctggtgaaatggcaggacctgtcggagaaggtggtctaccggc

SEQ ID NO: 32445 - RNA, 102 nt, synthetic construct
  source 1..102: mol_type = other RNA
cctctttggaggctgaatggggtcccccgactctggctttcccccaggtgtacatgttcctggtgaaatggcaggacctgtcggagaaggtggtctatcggc

SEQ ID NO: 32446 - RNA, 102 nt, synthetic construct
  source 1..102: mol_type = other RNA
cctctttggaggctgaatggggtcccccgactctggctttcccccaggtgtacatgttcctggtgaaatggcaggacctgtcggagaaggtggtctaccggc

SEQ ID NO: 32447 - RNA, 102 nt, synthetic construct
  source 1..102: mol_type = other RNA
cctctttggaggctgaatggggtcccccgactctggctttcccccaggtttacatgttcctggtgaaatggcaggacctgtcggagaaggtggtctaccggc

SEQ ID NO: 32448 - RNA, 102 nt, synthetic construct
  source 1..102: mol_type = other RNA
cctctttggaggctgaatggggtcccccgactctggctttcccccaggtatacatgttcctggtgaaatggcaggacctgtcggagaaggtggtctatcggc

SEQ ID NO: 32449 - RNA, 102 nt, synthetic construct
  source 1..102: mol_type = other RNA
cctctttggaggctgaatggggtcccccgactctggctttcccccaggtttacatgttcctggtgaaatggcaggacctgtcggagaaggtggtctatcggc

SEQ ID NO: 32450 - RNA, 103 nt, synthetic construct
  source 1..103: mol_type = other RNA
gcctctttggaggctgaatggggtcccccgactctggctttcccccaggtgtacatgttcctggtgaaatggcaggacctgtcggagaaggtggtctaccggc

SEQ ID NO: 32451 - RNA, 103 nt, synthetic construct
  source 1..103: mol_type = other RNA
gcctctttggaggctgaatggggtcccccgactctggctttcccccaggtctacatgttcctggtgaaatggcaggacctgtcggagaaggtggtctatcggc

SEQ ID NO: 32452 - RNA, 103 nt, synthetic construct
  source 1..103: mol_type = other RNA
gcctctttggaggctgaatggggtcccccgactctggctttcccccaggtctacatgttcctggtgaaatggcaggacctgtcggagaaggtggtctaccggc

SEQ ID NO: 32453 - RNA, 103 nt, synthetic construct
  source 1..103: mol_type = other RNA
gcctctttggaggctgaatggggtcccccgactctggctttcccccaggtatacatgttcctggtgaaatggcaggacctgtcggagaaggtggtctatcggc

SEQ ID NO: 32454 - RNA, 103 nt, synthetic construct
  source 1..103: mol_type = other RNA
gcctctttggaggctgaatggggtcccccgactctggctttcccccaggtatacatgttcctggtgaaatggcaggacctgtcggagaaggtggtctaccggc

SEQ ID NO: 32455 - RNA, 103 nt, synthetic construct
  source 1..103: mol_type = other RNA
gcctctttggaggctgaatggggtcccccgactctggctttcccccaggtgtacatgttcctggtgaaatggcaggacctgtcggagaaggtggtctatcggc

SEQ ID NO: 32456 - RNA, 103 nt, synthetic construct
  source 1..103: mol_type = other RNA
gcctctttggaggctgaatggggtcccccgactctggctttcccccaggtttacatgttcctggtgaaatggcaggacctgtcggagaaggtggtctaccggc

SEQ ID NO: 32457 - RNA, 103 nt, synthetic construct
  source 1..103: mol_type = other RNA
gcctctttggaggctgaatggggtcccccgactctggctttcccccaggtttacatgttcctggtgaaatggcaggacctgtcggagaaggtggtctatcggc

SEQ ID NO: 32458 - RNA, 20 nt, synthetic construct
  source 1..20: mol_type = other RNA
gtcggagaaggtggtctatc

SEQ ID NO: 32459 - RNA, 20 nt, synthetic construct
  source 1..20: mol_type = other RNA
cggagaaggtggtctatcgg

SEQ ID NO: 32460 - RNA, 16 nt, synthetic construct
  source 1..16: mol_type = other RNA
aagcctctttggaggc

SEQ ID NO: 32461 - RNA, 17 nt, synthetic construct
  source 1..17: mol_type = other RNA
aaagcctctttggaggc

SEQ ID NO: 32462 - RNA, 18 nt, synthetic construct
  source 1..18: mol_type = other RNA
caaagcctctttggaggc

SEQ ID NO: 32463 - RNA, 19 nt, synthetic construct
  source 1..19: mol_type = other RNA
gcaaagcctctttggaggc

SEQ ID NO: 32464 - RNA, 20 nt, synthetic construct
  source 1..20: mol_type = other RNA
agcaaagcctctttggaggc

SEQ ID NO: 32465 - RNA, 21 nt, synthetic construct
  source 1..21: mol_type = other RNA
cagcaaagcctctttggaggc

SEQ ID NO: 32466 - RNA, 22 nt, synthetic construct
  source 1..22: mol_type = other RNA
acagcaaagcctctttggaggc

SEQ ID NO: 32467-32471 - skipped (5 entries)

SEQ ID NO: 32472 - RNA, 10 nt, synthetic construct
  source 1..10: mol_type = other RNA
tccaaagagg

SEQ ID NO: 32473 - RNA, 11 nt, synthetic construct
  source 1..11: mol_type = other RNA
tccaaagaggc

SEQ ID NO: 32474 - RNA, 12 nt, synthetic construct
  source 1..12: mol_type = other RNA
tccaaagaggct

SEQ ID NO: 32475 - RNA, 13 nt, synthetic construct
  source 1..13: mol_type = other RNA
tccaaagaggctt

SEQ ID NO: 32476 - RNA, 14 nt, synthetic construct
  source 1..14: mol_type = other RNA
tccaaagaggcttt

SEQ ID NO: 32477 - RNA, 15 nt, synthetic construct
  source 1..15: mol_type = other RNA
tccaaagaggctttg

SEQ ID NO: 32478 - RNA, 16 nt, synthetic construct
  source 1..16: mol_type = other RNA
tccaaagaggctttgc

SEQ ID NO: 32479 - RNA, 17 nt, synthetic construct
  source 1..17: mol_type = other RNA
tccaaagaggctttgct

SEQ ID NO: 32480 - RNA, 18 nt, synthetic construct
  source 1..18: mol_type = other RNA
tccaaagaggctttgctg

SEQ ID NO: 32481 - RNA, 19 nt, synthetic construct
  source 1..19: mol_type = other RNA
tccaaagaggctttgctgt

SEQ ID NO: 32482 - RNA, 39 nt, synthetic construct
  source 1..39: mol_type = other RNA
acctgggggaaagccagagtcgggggaccccattcagcc

SEQ ID NO: 32483 - RNA, 40 nt, synthetic construct
  source 1..40: mol_type = other RNA
cacctgggggaaagccagagtcgggggaccccattcagcc

SEQ ID NO: 32484 - RNA, 40 nt, synthetic construct
  source 1..40: mol_type = other RNA
tacctgggggaaagccagagtcgggggaccccattcagcc

SEQ ID NO: 32485 - RNA, 40 nt, synthetic construct
  source 1..40: mol_type = other RNA
aacctgggggaaagccagagtcgggggaccccattcagcc

SEQ ID NO: 32486 - RNA, 40 nt, synthetic construct
  source 1..40: mol_type = other RNA
gacctgggggaaagccagagtcgggggaccccattcagcc

SEQ ID NO: 32487 - RNA, 41 nt, synthetic construct
  source 1..41: mol_type = other RNA
aaacctgggggaaagccagagtcgggggaccccattcagcc

SEQ ID NO: 32488 - RNA, 41 nt, synthetic construct
  source 1..41: mol_type = other RNA
acacctgggggaaagccagagtcgggggaccccattcagcc

SEQ ID NO: 32489 - RNA, 41 nt, synthetic construct
  source 1..41: mol_type = other RNA
agacctgggggaaagccagagtcgggggaccccattcagcc

SEQ ID NO: 32490 - RNA, 41 nt, synthetic construct
  source 1..41: mol_type = other RNA
atacctgggggaaagccagagtcgggggaccccattcagcc

SEQ ID NO: 32491 - RNA, 42 nt, synthetic construct
  source 1..42: mol_type = other RNA
taaacctgggggaaagccagagtcgggggaccccattcagcc

SEQ ID NO: 32492 - RNA, 42 nt, synthetic construct
  source 1..42: mol_type = other RNA
tacacctgggggaaagccagagtcgggggaccccattcagcc

SEQ ID NO: 32493 - RNA, 42 nt, synthetic construct
  source 1..42: mol_type = other RNA
tatacctgggggaaagccagagtcgggggaccccattcagcc

SEQ ID NO: 32494 - RNA, 42 nt, synthetic construct
  source 1..42: mol_type = other RNA
tagacctgggggaaagccagagtcgggggaccccattcagcc

SEQ ID NO: 32495 - RNA, 43 nt, synthetic construct
  source 1..43: mol_type = other RNA
gtaaacctgggggaaagccagagtcgggggaccccattcagcc

SEQ ID NO: 32496 - RNA, 43 nt, synthetic construct
  source 1..43: mol_type = other RNA
gtatacctgggggaaagccagagtcgggggaccccattcagcc

SEQ ID NO: 32497 - RNA, 43 nt, synthetic construct
  source 1..43: mol_type = other RNA
gtagacctgggggaaagccagagtcgggggaccccattcagcc

SEQ ID NO: 32498 - RNA, 43 nt, synthetic construct
  source 1..43: mol_type = other RNA
gtacacctgggggaaagccagagtcgggggaccccattcagcc

SEQ ID NO: 32499 - RNA, 44 nt, synthetic construct
  source 1..44: mol_type = other RNA
tgtaaacctgggggaaagccagagtcgggggaccccattcagcc

SEQ ID NO: 32500 - RNA, 44 nt, synthetic construct
  source 1..44: mol_type = other RNA
tgtacacctgggggaaagccagagtcgggggaccccattcagcc

SEQ ID NO: 32501 - RNA, 44 nt, synthetic construct
  source 1..44: mol_type = other RNA
tgtatacctgggggaaagccagagtcgggggaccccattcagcc

SEQ ID NO: 32502 - RNA, 44 nt, synthetic construct
  source 1..44: mol_type = other RNA
tgtagacctgggggaaagccagagtcgggggaccccattcagcc

SEQ ID NO: 32503 - RNA, 45 nt, synthetic construct
  source 1..45: mol_type = other RNA
atgtagacctgggggaaagccagagtcgggggaccccattcagcc

SEQ ID NO: 32504 - RNA, 45 nt, synthetic construct
  source 1..45: mol_type = other RNA
atgtaaacctgggggaaagccagagtcgggggaccccattcagcc

SEQ ID NO: 32505 - RNA, 45 nt, synthetic construct
  source 1..45: mol_type = other RNA
atgtacacctgggggaaagccagagtcgggggaccccattcagcc

SEQ ID NO: 32506 - RNA, 45 nt, synthetic construct
  source 1..45: mol_type = other RNA
atgtatacctgggggaaagccagagtcgggggaccccattcagcc

SEQ ID NO: 32507 - RNA, 46 nt, synthetic construct
  source 1..46: mol_type = other RNA
catgtagacctgggggaaagccagagtcgggggaccccattcagcc

SEQ ID NO: 32508 - RNA, 46 nt, synthetic construct
  source 1..46: mol_type = other RNA
catgtacacctgggggaaagccagagtcgggggaccccattcagcc

SEQ ID NO: 32509 - RNA, 46 nt, synthetic construct
  source 1..46: mol_type = other RNA
catgtaaacctgggggaaagccagagtcgggggaccccattcagcc

SEQ ID NO: 32510 - RNA, 46 nt, synthetic construct
  source 1..46: mol_type = other RNA
catgtatacctgggggaaagccagagtcgggggaccccattcagcc

SEQ ID NO: 32511 - RNA, 47 nt, synthetic construct
  source 1..47: mol_type = other RNA
acatgtaaacctgggggaaagccagagtcgggggaccccattcagcc

SEQ ID NO: 32512 - RNA, 47 nt, synthetic construct
  source 1..47: mol_type = other RNA
acatgtacacctgggggaaagccagagtcgggggaccccattcagcc

SEQ ID NO: 32513 - RNA, 47 nt, synthetic construct
  source 1..47: mol_type = other RNA
acatgtatacctgggggaaagccagagtcgggggaccccattcagcc

SEQ ID NO: 32514 - RNA, 47 nt, synthetic construct
  source 1..47: mol_type = other RNA
acatgtagacctgggggaaagccagagtcgggggaccccattcagcc

SEQ ID NO: 32515 - RNA, 48 nt, synthetic construct
  source 1..48: mol_type = other RNA
aacatgtacacctgggggaaagccagagtcgggggaccccattcagcc

SEQ ID NO: 32516 - RNA, 48 nt, synthetic construct
  source 1..48: mol_type = other RNA
aacatgtaaacctgggggaaagccagagtcgggggaccccattcagcc

SEQ ID NO: 32517 - RNA, 48 nt, synthetic construct
  source 1..48: mol_type = other RNA
aacatgtagacctgggggaaagccagagtcgggggaccccattcagcc

SEQ ID NO: 32518 - RNA, 48 nt, synthetic construct
  source 1..48: mol_type = other RNA
aacatgtatacctgggggaaagccagagtcgggggaccccattcagcc

SEQ ID NO: 32519 - RNA, 49 nt, synthetic construct
  source 1..49: mol_type = other RNA
gaacatgtatacctgggggaaagccagagtcgggggaccccattcagcc

SEQ ID NO: 32520 - RNA, 49 nt, synthetic construct
  source 1..49: mol_type = other RNA
gaacatgtaaacctgggggaaagccagagtcgggggaccccattcagcc

SEQ ID NO: 32521 - RNA, 49 nt, synthetic construct
  source 1..49: mol_type = other RNA
gaacatgtagacctgggggaaagccagagtcgggggaccccattcagcc

SEQ ID NO: 32522 - RNA, 49 nt, synthetic construct
  source 1..49: mol_type = other RNA
gaacatgtacacctgggggaaagccagagtcgggggaccccattcagcc

SEQ ID NO: 32523 - RNA, 50 nt, synthetic construct
  source 1..50: mol_type = other RNA
ggaacatgtaaacctgggggaaagccagagtcgggggaccccattcagcc

SEQ ID NO: 32524 - RNA, 50 nt, synthetic construct
  source 1..50: mol_type = other RNA
ggaacatgtatacctgggggaaagccagagtcgggggaccccattcagcc

SEQ ID NO: 32525 - RNA, 50 nt, synthetic construct
  source 1..50: mol_type = other RNA
ggaacatgtagacctgggggaaagccagagtcgggggaccccattcagcc

SEQ ID NO: 32526 - RNA, 50 nt, synthetic construct
  source 1..50: mol_type = other RNA
ggaacatgtacacctgggggaaagccagagtcgggggaccccattcagcc

SEQ ID NO: 32527 - RNA, 51 nt, synthetic construct
  source 1..51: mol_type = other RNA
aggaacatgtatacctgggggaaagccagagtcgggggaccccattcagcc

SEQ ID NO: 32528 - RNA, 51 nt, synthetic construct
  source 1..51: mol_type = other RNA
aggaacatgtagacctgggggaaagccagagtcgggggaccccattcagcc

SEQ ID NO: 32529 - RNA, 51 nt, synthetic construct
  source 1..51: mol_type = other RNA
aggaacatgtacacctgggggaaagccagagtcgggggaccccattcagcc

SEQ ID NO: 32530 - RNA, 51 nt, synthetic construct
  source 1..51: mol_type = other RNA
aggaacatgtaaacctgggggaaagccagagtcgggggaccccattcagcc

SEQ ID NO: 32531 - RNA, 52 nt, synthetic construct
  source 1..52: mol_type = other RNA
caggaacatgtagacctgggggaaagccagagtcgggggaccccattcagcc

SEQ ID NO: 32532 - RNA, 52 nt, synthetic construct
  source 1..52: mol_type = other RNA
caggaacatgtacacctgggggaaagccagagtcgggggaccccattcagcc

SEQ ID NO: 32533 - RNA, 52 nt, synthetic construct
  source 1..52: mol_type = other RNA
caggaacatgtatacctgggggaaagccagagtcgggggaccccattcagcc

SEQ ID NO: 32534 - RNA, 52 nt, synthetic construct
  source 1..52: mol_type = other RNA
caggaacatgtaaacctgggggaaagccagagtcgggggaccccattcagcc

SEQ ID NO: 32535 - RNA, 53 nt, synthetic construct
  source 1..53: mol_type = other RNA
ccaggaacatgtacacctgggggaaagccagagtcgggggaccccattcagcc

SEQ ID NO: 32536 - RNA, 53 nt, synthetic construct
  source 1..53: mol_type = other RNA
ccaggaacatgtagacctgggggaaagccagagtcgggggaccccattcagcc

SEQ ID NO: 32537 - RNA, 53 nt, synthetic construct
  source 1..53: mol_type = other RNA
ccaggaacatgtatacctgggggaaagccagagtcgggggaccccattcagcc

SEQ ID NO: 32538 - RNA, 53 nt, synthetic construct
  source 1..53: mol_type = other RNA
ccaggaacatgtaaacctgggggaaagccagagtcgggggaccccattcagcc

SEQ ID NO: 32539 - RNA, 54 nt, synthetic construct
  source 1..54: mol_type = other RNA
accaggaacatgtatacctgggggaaagccagagtcgggggaccccattcagcc

SEQ ID NO: 32540 - RNA, 54 nt, synthetic construct
  source 1..54: mol_type = other RNA
accaggaacatgtaaacctgggggaaagccagagtcgggggaccccattcagcc

SEQ ID NO: 32541 - RNA, 54 nt, synthetic construct
  source 1..54: mol_type = other RNA
accaggaacatgtagacctgggggaaagccagagtcgggggaccccattcagcc

SEQ ID NO: 32542 - RNA, 54 nt, synthetic construct
  source 1..54: mol_type = other RNA
accaggaacatgtacacctgggggaaagccagagtcgggggaccccattcagcc

SEQ ID NO: 32543 - RNA, 55 nt, synthetic construct
  source 1..55: mol_type = other RNA
caccaggaacatgtagacctgggggaaagccagagtcgggggaccccattcagcc

SEQ ID NO: 32544 - RNA, 55 nt, synthetic construct
  source 1..55: mol_type = other RNA
caccaggaacatgtaaacctgggggaaagccagagtcgggggaccccattcagcc

SEQ ID NO: 32545 - RNA, 55 nt, synthetic construct
  source 1..55: mol_type = other RNA
caccaggaacatgtacacctgggggaaagccagagtcgggggaccccattcagcc

SEQ ID NO: 32546 - RNA, 55 nt, synthetic construct
  source 1..55: mol_type = other RNA
caccaggaacatgtatacctgggggaaagccagagtcgggggaccccattcagcc

SEQ ID NO: 32547 - RNA, 56 nt, synthetic construct
  source 1..56: mol_type = other RNA
tcaccaggaacatgtaaacctgggggaaagccagagtcgggggaccccattcagcc

SEQ ID NO: 32548 - RNA, 56 nt, synthetic construct
  source 1..56: mol_type = other RNA
tcaccaggaacatgtacacctgggggaaagccagagtcgggggaccccattcagcc

SEQ ID NO: 32549 - RNA, 56 nt, synthetic construct
  source 1..56: mol_type = other RNA
tcaccaggaacatgtagacctgggggaaagccagagtcgggggaccccattcagcc

SEQ ID NO: 32550 - RNA, 56 nt, synthetic construct
  source 1..56: mol_type = other RNA
tcaccaggaacatgtatacctgggggaaagccagagtcgggggaccccattcagcc

SEQ ID NO: 32551 - RNA, 57 nt, synthetic construct
  source 1..57: mol_type = other RNA
ttcaccaggaacatgtacacctgggggaaagccagagtcgggggaccccattcagcc

SEQ ID NO: 32552 - RNA, 57 nt, synthetic construct
  source 1..57: mol_type = other RNA
ttcaccaggaacatgtatacctgggggaaagccagagtcgggggaccccattcagcc

SEQ ID NO: 32553 - RNA, 57 nt, synthetic construct
  source 1..57: mol_type = other RNA
ttcaccaggaacatgtaaacctgggggaaagccagagtcgggggaccccattcagcc

SEQ ID NO: 32554 - RNA, 57 nt, synthetic construct
  source 1..57: mol_type = other RNA
ttcaccaggaacatgtagacctgggggaaagccagagtcgggggaccccattcagcc

SEQ ID NO: 32555 - RNA, 58 nt, synthetic construct
  source 1..58: mol_type = other RNA
tttcaccaggaacatgtaaacctgggggaaagccagagtcgggggaccccattcagcc

SEQ ID NO: 32556 - RNA, 58 nt, synthetic construct
  source 1..58: mol_type = other RNA
tttcaccaggaacatgtatacctgggggaaagccagagtcgggggaccccattcagcc

SEQ ID NO: 32557 - RNA, 58 nt, synthetic construct
  source 1..58: mol_type = other RNA
tttcaccaggaacatgtagacctgggggaaagccagagtcgggggaccccattcagcc

SEQ ID NO: 32558 - RNA, 58 nt, synthetic construct
  source 1..58: mol_type = other RNA
tttcaccaggaacatgtacacctgggggaaagccagagtcgggggaccccattcagcc

SEQ ID NO: 32559 - RNA, 59 nt, synthetic construct
  source 1..59: mol_type = other RNA
atttcaccaggaacatgtagacctgggggaaagccagagtcgggggaccccattcagcc

SEQ ID NO: 32560 - RNA, 59 nt, synthetic construct
  source 1..59: mol_type = other RNA
atttcaccaggaacatgtacacctgggggaaagccagagtcgggggaccccattcagcc

SEQ ID NO: 32561 - RNA, 59 nt, synthetic construct
  source 1..59: mol_type = other RNA
atttcaccaggaacatgtatacctgggggaaagccagagtcgggggaccccattcagcc

SEQ ID NO: 32562 - RNA, 59 nt, synthetic construct
  source 1..59: mol_type = other RNA
atttcaccaggaacatgtaaacctgggggaaagccagagtcgggggaccccattcagcc

SEQ ID NO: 32563 - RNA, 60 nt, synthetic construct
  source 1..60: mol_type = other RNA
catttcaccaggaacatgtaaacctgggggaaagccagagtcgggggaccccattcagcc

SEQ ID NO: 32564 - RNA, 60 nt, synthetic construct
  source 1..60: mol_type = other RNA
catttcaccaggaacatgtacacctgggggaaagccagagtcgggggaccccattcagcc

SEQ ID NO: 32565 - RNA, 60 nt, synthetic construct
  source 1..60: mol_type = other RNA
catttcaccaggaacatgtagacctgggggaaagccagagtcgggggaccccattcagcc

SEQ ID NO: 32566 - RNA, 60 nt, synthetic construct
  source 1..60: mol_type = other RNA
catttcaccaggaacatgtatacctgggggaaagccagagtcgggggaccccattcagcc

SEQ ID NO: 32567 - RNA, 61 nt, synthetic construct
  source 1..61: mol_type = other RNA
ccatttcaccaggaacatgtaaacctgggggaaagccagagtcgggggaccccattcagcc

SEQ ID NO: 32568 - RNA, 61 nt, synthetic construct
  source 1..61: mol_type = other RNA
ccatttcaccaggaacatgtagacctgggggaaagccagagtcgggggaccccattcagcc

SEQ ID NO: 32569 - RNA, 61 nt, synthetic construct
  source 1..61: mol_type = other RNA
ccatttcaccaggaacatgtatacctgggggaaagccagagtcgggggaccccattcagcc

SEQ ID NO: 32570 - RNA, 61 nt, synthetic construct
  source 1..61: mol_type = other RNA
ccatttcaccaggaacatgtacacctgggggaaagccagagtcgggggaccccattcagcc

SEQ ID NO: 32571 - RNA, 62 nt, synthetic construct
  source 1..62: mol_type = other RNA
gccatttcaccaggaacatgtaaacctgggggaaagccagagtcgggggaccccattcagcc

SEQ ID NO: 32572 - RNA, 62 nt, synthetic construct
  source 1..62: mol_type = other RNA
gccatttcaccaggaacatgtacacctgggggaaagccagagtcgggggaccccattcagcc

SEQ ID NO: 32573 - RNA, 62 nt, synthetic construct
  source 1..62: mol_type = other RNA
gccatttcaccaggaacatgtagacctgggggaaagccagagtcgggggaccccattcagcc

SEQ ID NO: 32574 - RNA, 62 nt, synthetic construct
  source 1..62: mol_type = other RNA
gccatttcaccaggaacatgtatacctgggggaaagccagagtcgggggaccccattcagcc

SEQ ID NO: 32575 - RNA, 63 nt, synthetic construct
  source 1..63: mol_type = other RNA
tgccatttcaccaggaacatgtagacctgggggaaagccagagtcgggggaccccattcagcc

SEQ ID NO: 32576 - RNA, 63 nt, synthetic construct
  source 1..63: mol_type = other RNA
tgccatttcaccaggaacatgtaaacctgggggaaagccagagtcgggggaccccattcagcc

SEQ ID NO: 32577 - RNA, 63 nt, synthetic construct
  source 1..63: mol_type = other RNA
tgccatttcaccaggaacatgtatacctgggggaaagccagagtcgggggaccccattcagcc

SEQ ID NO: 32578 - RNA, 63 nt, synthetic construct
  source 1..63: mol_type = other RNA
tgccatttcaccaggaacatgtacacctgggggaaagccagagtcgggggaccccattcagcc

SEQ ID NO: 32579 - RNA, 64 nt, synthetic construct
  source 1..64: mol_type = other RNA
ctgccatttcaccaggaacatgtaaacctgggggaaagccagagtcgggggaccccattcagcc

SEQ ID NO: 32580 - RNA, 64 nt, synthetic construct
  source 1..64: mol_type = other RNA
ctgccatttcaccaggaacatgtagacctgggggaaagccagagtcgggggaccccattcagcc

SEQ ID NO: 32581 - RNA, 64 nt, synthetic construct
  source 1..64: mol_type = other RNA
ctgccatttcaccaggaacatgtatacctgggggaaagccagagtcgggggaccccattcagcc

SEQ ID NO: 32582 - RNA, 64 nt, synthetic construct
  source 1..64: mol_type = other RNA
ctgccatttcaccaggaacatgtacacctgggggaaagccagagtcgggggaccccattcagcc

SEQ ID NO: 32583 - RNA, 65 nt, synthetic construct
  source 1..65: mol_type = other RNA
cctgccatttcaccaggaacatgtatacctgggggaaagccagagtcgggggaccccattcagcc

SEQ ID NO: 32584 - RNA, 65 nt, synthetic construct
  source 1..65: mol_type = other RNA
cctgccatttcaccaggaacatgtagacctgggggaaagccagagtcgggggaccccattcagcc

SEQ ID NO: 32585 - RNA, 65 nt, synthetic construct
  source 1..65: mol_type = other RNA
cctgccatttcaccaggaacatgtaaacctgggggaaagccagagtcgggggaccccattcagcc

SEQ ID NO: 32586 - RNA, 65 nt, synthetic construct
  source 1..65: mol_type = other RNA
cctgccatttcaccaggaacatgtacacctgggggaaagccagagtcgggggaccccattcagcc

SEQ ID NO: 32587 - RNA, 66 nt, synthetic construct
  source 1..66: mol_type = other RNA
tcctgccatttcaccaggaacatgtatacctgggggaaagccagagtcgggggaccccattcagcc

SEQ ID NO: 32588 - RNA, 66 nt, synthetic construct
  source 1..66: mol_type = other RNA
tcctgccatttcaccaggaacatgtacacctgggggaaagccagagtcgggggaccccattcagcc

SEQ ID NO: 32589 - RNA, 66 nt, synthetic construct
  source 1..66: mol_type = other RNA
tcctgccatttcaccaggaacatgtagacctgggggaaagccagagtcgggggaccccattcagcc

SEQ ID NO: 32590 - RNA, 66 nt, synthetic construct
  source 1..66: mol_type = other RNA
tcctgccatttcaccaggaacatgtaaacctgggggaaagccagagtcgggggaccccattcagcc

SEQ ID NO: 32591 - RNA, 67 nt, synthetic construct
  source 1..67: mol_type = other RNA
gtcctgccatttcaccaggaacatgtaaacctgggggaaagccagagtcgggggaccccattcagcc

SEQ ID NO: 32592 - RNA, 67 nt, synthetic construct
  source 1..67: mol_type = other RNA
gtcctgccatttcaccaggaacatgtatacctgggggaaagccagagtcgggggaccccattcagcc

SEQ ID NO: 32593 - RNA, 67 nt, synthetic construct
  source 1..67: mol_type = other RNA
gtcctgccatttcaccaggaacatgtagacctgggggaaagccagagtcgggggaccccattcagcc

SEQ ID NO: 32594 - RNA, 67 nt, synthetic construct
  source 1..67: mol_type = other RNA
gtcctgccatttcaccaggaacatgtacacctgggggaaagccagagtcgggggaccccattcagcc

SEQ ID NO: 32595 - RNA, 68 nt, synthetic construct
  source 1..68: mol_type = other RNA
ggtcctgccatttcaccaggaacatgtatacctgggggaaagccagagtcgggggaccccattcagcc

SEQ ID NO: 32596 - RNA, 68 nt, synthetic construct
  source 1..68: mol_type = other RNA
ggtcctgccatttcaccaggaacatgtagacctgggggaaagccagagtcgggggaccccattcagcc

SEQ ID NO: 32597 - RNA, 68 nt, synthetic construct
  source 1..68: mol_type = other RNA
ggtcctgccatttcaccaggaacatgtacacctgggggaaagccagagtcgggggaccccattcagcc

SEQ ID NO: 32598 - RNA, 68 nt, synthetic construct
  source 1..68: mol_type = other RNA
ggtcctgccatttcaccaggaacatgtaaacctgggggaaagccagagtcgggggaccccattcagcc

SEQ ID NO: 32599 - RNA, 69 nt, synthetic construct
  source 1..69: mol_type = other RNA
aggtcctgccatttcaccaggaacatgtaaacctgggggaaagccagagtcgggggaccccattcagcc

SEQ ID NO: 32600 - RNA, 69 nt, synthetic construct
  source 1..69: mol_type = other RNA
aggtcctgccatttcaccaggaacatgtacacctgggggaaagccagagtcgggggaccccattcagcc

SEQ ID NO: 32601 - RNA, 69 nt, synthetic construct
  source 1..69: mol_type = other RNA
aggtcctgccatttcaccaggaacatgtagacctgggggaaagccagagtcgggggaccccattcagcc

SEQ ID NO: 32602 - RNA, 69 nt, synthetic construct
  source 1..69: mol_type = other RNA
aggtcctgccatttcaccaggaacatgtatacctgggggaaagccagagtcgggggaccccattcagcc

SEQ ID NO: 32603 - RNA, 70 nt, synthetic construct
  source 1..70: mol_type = other RNA
caggtcctgccatttcaccaggaacatgtaaacctgggggaaagccagagtcgggggaccccattcagcc

SEQ ID NO: 32604 - RNA, 70 nt, synthetic construct
  source 1..70: mol_type = other RNA
caggtcctgccatttcaccaggaacatgtacacctgggggaaagccagagtcgggggaccccattcagcc

SEQ ID NO: 32605 - RNA, 70 nt, synthetic construct
  source 1..70: mol_type = other RNA
caggtcctgccatttcaccaggaacatgtagacctgggggaaagccagagtcgggggaccccattcagcc

SEQ ID NO: 32606 - RNA, 70 nt, synthetic construct
  source 1..70: mol_type = other RNA
caggtcctgccatttcaccaggaacatgtatacctgggggaaagccagagtcgggggaccccattcagcc

SEQ ID NO: 32607 - RNA, 71 nt, synthetic construct
  source 1..71: mol_type = other RNA
acaggtcctgccatttcaccaggaacatgtaaacctgggggaaagccagagtcgggggaccccattcagcc

SEQ ID NO: 32608 - RNA, 71 nt, synthetic construct
  source 1..71: mol_type = other RNA
acaggtcctgccatttcaccaggaacatgtagacctgggggaaagccagagtcgggggaccccattcagcc

SEQ ID NO: 32609 - RNA, 71 nt, synthetic construct
  source 1..71: mol_type = other RNA
acaggtcctgccatttcaccaggaacatgtatacctgggggaaagccagagtcgggggaccccattcagcc

SEQ ID NO: 32610 - RNA, 71 nt, synthetic construct
  source 1..71: mol_type = other RNA
acaggtcctgccatttcaccaggaacatgtacacctgggggaaagccagagtcgggggaccccattcagcc

SEQ ID NO: 32611 - RNA, 72 nt, synthetic construct
  source 1..72: mol_type = other RNA
gacaggtcctgccatttcaccaggaacatgtacacctgggggaaagccagagtcgggggaccccattcagcc

SEQ ID NO: 32612 - RNA, 72 nt, synthetic construct
  source 1..72: mol_type = other RNA
gacaggtcctgccatttcaccaggaacatgtatacctgggggaaagccagagtcgggggaccccattcagcc

SEQ ID NO: 32613 - RNA, 72 nt, synthetic construct
  source 1..72: mol_type = other RNA
gacaggtcctgccatttcaccaggaacatgtagacctgggggaaagccagagtcgggggaccccattcagcc

SEQ ID NO: 32614 - RNA, 72 nt, synthetic construct
  source 1..72: mol_type = other RNA
gacaggtcctgccatttcaccaggaacatgtaaacctgggggaaagccagagtcgggggaccccattcagcc

SEQ ID NO: 32615 - RNA, 73 nt, synthetic construct
  source 1..73: mol_type = other RNA
cgacaggtcctgccatttcaccaggaacatgtacacctgggggaaagccagagtcgggggaccccattcagcc

SEQ ID NO: 32616 - RNA, 73 nt, synthetic construct
  source 1..73: mol_type = other RNA
cgacaggtcctgccatttcaccaggaacatgtaaacctgggggaaagccagagtcgggggaccccattcagcc

SEQ ID NO: 32617 - RNA, 73 nt, synthetic construct
  source 1..73: mol_type = other RNA
cgacaggtcctgccatttcaccaggaacatgtagacctgggggaaagccagagtcgggggaccccattcagcc

SEQ ID NO: 32618 - RNA, 73 nt, synthetic construct
  source 1..73: mol_type = other RNA
cgacaggtcctgccatttcaccaggaacatgtatacctgggggaaagccagagtcgggggaccccattcagcc

SEQ ID NO: 32619 - RNA, 74 nt, synthetic construct
  source 1..74: mol_type = other RNA
ccgacaggtcctgccatttcaccaggaacatgtatacctgggggaaagccagagtcgggggaccccattcagcc

SEQ ID NO: 32620 - RNA, 74 nt, synthetic construct
  source 1..74: mol_type = other RNA
ccgacaggtcctgccatttcaccaggaacatgtacacctgggggaaagccagagtcgggggaccccattcagcc

SEQ ID NO: 32621 - RNA, 74 nt, synthetic construct
  source 1..74: mol_type = other RNA
ccgacaggtcctgccatttcaccaggaacatgtaaacctgggggaaagccagagtcgggggaccccattcagcc

SEQ ID NO: 32622 - RNA, 74 nt, synthetic construct
  source 1..74: mol_type = other RNA
ccgacaggtcctgccatttcaccaggaacatgtagacctgggggaaagccagagtcgggggaccccattcagcc

SEQ ID NO: 32623 - RNA, 75 nt, synthetic construct
  source 1..75: mol_type = other RNA
tccgacaggtcctgccatttcaccaggaacatgtaaacctgggggaaagccagagtcgggggaccccattcagcc

SEQ ID NO: 32624 - RNA, 75 nt, synthetic construct
  source 1..75: mol_type = other RNA
tccgacaggtcctgccatttcaccaggaacatgtagacctgggggaaagccagagtcgggggaccccattcagcc

SEQ ID NO: 32625 - RNA, 75 nt, synthetic construct
  source 1..75: mol_type = other RNA
tccgacaggtcctgccatttcaccaggaacatgtacacctgggggaaagccagagtcgggggaccccattcagcc

SEQ ID NO: 32626 - RNA, 75 nt, synthetic construct
  source 1..75: mol_type = other RNA
tccgacaggtcctgccatttcaccaggaacatgtatacctgggggaaagccagagtcgggggaccccattcagcc

SEQ ID NO: 32627 - RNA, 76 nt, synthetic construct
  source 1..76: mol_type = other RNA
ctccgacaggtcctgccatttcaccaggaacatgtatacctgggggaaagccagagtcgggggaccccattcagcc

SEQ ID NO: 32628 - RNA, 76 nt, synthetic construct
  source 1..76: mol_type = other RNA
ctccgacaggtcctgccatttcaccaggaacatgtagacctgggggaaagccagagtcgggggaccccattcagcc

SEQ ID NO: 32629 - RNA, 76 nt, synthetic construct
  source 1..76: mol_type = other RNA
ctccgacaggtcctgccatttcaccaggaacatgtaaacctgggggaaagccagagtcgggggaccccattcagcc

SEQ ID NO: 32630 - RNA, 76 nt, synthetic construct
  source 1..76: mol_type = other RNA
ctccgacaggtcctgccatttcaccaggaacatgtacacctgggggaaagccagagtcgggggaccccattcagcc

SEQ ID NO: 32631 - RNA, 77 nt, synthetic construct
  source 1..77: mol_type = other RNA
tctccgacaggtcctgccatttcaccaggaacatgtatacctgggggaaagccagagtcgggggaccccattcagcc

SEQ ID NO: 32632 - RNA, 77 nt, synthetic construct
  source 1..77: mol_type = other RNA
tctccgacaggtcctgccatttcaccaggaacatgtaaacctgggggaaagccagagtcgggggaccccattcagcc

SEQ ID NO: 32633 - RNA, 77 nt, synthetic construct
  source 1..77: mol_type = other RNA
tctccgacaggtcctgccatttcaccaggaacatgtagacctgggggaaagccagagtcgggggaccccattcagcc

SEQ ID NO: 32634 - RNA, 77 nt, synthetic construct
  source 1..77: mol_type = other RNA
tctccgacaggtcctgccatttcaccaggaacatgtacacctgggggaaagccagagtcgggggaccccattcagcc

SEQ ID NO: 32635 - RNA, 78 nt, synthetic construct
  source 1..78: mol_type = other RNA
ttctccgacaggtcctgccatttcaccaggaacatgtatacctgggggaaagccagagtcgggggaccccattcagcc

SEQ ID NO: 32636 - RNA, 78 nt, synthetic construct
  source 1..78: mol_type = other RNA
ttctccgacaggtcctgccatttcaccaggaacatgtaaacctgggggaaagccagagtcgggggaccccattcagcc

SEQ ID NO: 32637 - RNA, 78 nt, synthetic construct
  source 1..78: mol_type = other RNA
ttctccgacaggtcctgccatttcaccaggaacatgtagacctgggggaaagccagagtcgggggaccccattcagcc

SEQ ID NO: 32638 - RNA, 78 nt, synthetic construct
  source 1..78: mol_type = other RNA
ttctccgacaggtcctgccatttcaccaggaacatgtacacctgggggaaagccagagtcgggggaccccattcagcc

SEQ ID NO: 32639 - RNA, 79 nt, synthetic construct
  source 1..79: mol_type = other RNA
cttctccgacaggtcctgccatttcaccaggaacatgtatacctgggggaaagccagagtcgggggaccccattcagcc

SEQ ID NO: 32640 - RNA, 79 nt, synthetic construct
  source 1..79: mol_type = other RNA
cttctccgacaggtcctgccatttcaccaggaacatgtacacctgggggaaagccagagtcgggggaccccattcagcc

SEQ ID NO: 32641 - RNA, 79 nt, synthetic construct
  source 1..79: mol_type = other RNA
cttctccgacaggtcctgccatttcaccaggaacatgtaaacctgggggaaagccagagtcgggggaccccattcagcc

SEQ ID NO: 32642 - RNA, 79 nt, synthetic construct
  source 1..79: mol_type = other RNA
cttctccgacaggtcctgccatttcaccaggaacatgtagacctgggggaaagccagagtcgggggaccccattcagcc

SEQ ID NO: 32643 - RNA, 80 nt, synthetic construct
  source 1..80: mol_type = other RNA
ccttctccgacaggtcctgccatttcaccaggaacatgtacacctgggggaaagccagagtcgggggaccccattcagcc

SEQ ID NO: 32644 - RNA, 80 nt, synthetic construct
  source 1..80: mol_type = other RNA
ccttctccgacaggtcctgccatttcaccaggaacatgtaaacctgggggaaagccagagtcgggggaccccattcagcc

SEQ ID NO: 32645 - RNA, 80 nt, synthetic construct
  source 1..80: mol_type = other RNA
ccttctccgacaggtcctgccatttcaccaggaacatgtagacctgggggaaagccagagtcgggggaccccattcagcc

SEQ ID NO: 32646 - RNA, 80 nt, synthetic construct
  source 1..80: mol_type = other RNA
ccttctccgacaggtcctgccatttcaccaggaacatgtatacctgggggaaagccagagtcgggggaccccattcagcc

SEQ ID NO: 32647 - RNA, 81 nt, synthetic construct
  source 1..81: mol_type = other RNA
accttctccgacaggtcctgccatttcaccaggaacatgtaaacctgggggaaagccagagtcgggggaccccattcagcc

SEQ ID NO: 32648 - RNA, 81 nt, synthetic construct
  source 1..81: mol_type = other RNA
accttctccgacaggtcctgccatttcaccaggaacatgtacacctgggggaaagccagagtcgggggaccccattcagcc

SEQ ID NO: 32649 - RNA, 81 nt, synthetic construct
  source 1..81: mol_type = other RNA
accttctccgacaggtcctgccatttcaccaggaacatgtatacctgggggaaagccagagtcgggggaccccattcagcc

SEQ ID NO: 32650 - RNA, 81 nt, synthetic construct
  source 1..81: mol_type = other RNA
accttctccgacaggtcctgccatttcaccaggaacatgtagacctgggggaaagccagagtcgggggaccccattcagcc

SEQ ID NO: 32651 - RNA, 82 nt, synthetic construct
  source 1..82: mol_type = other RNA
caccttctccgacaggtcctgccatttcaccaggaacatgtacacctgggggaaagccagagtcgggggaccccattcagcc

SEQ ID NO: 32652 - RNA, 82 nt, synthetic construct
  source 1..82: mol_type = other RNA
caccttctccgacaggtcctgccatttcaccaggaacatgtaaacctgggggaaagccagagtcgggggaccccattcagcc

SEQ ID NO: 32653 - RNA, 82 nt, synthetic construct
  source 1..82: mol_type = other RNA
caccttctccgacaggtcctgccatttcaccaggaacatgtagacctgggggaaagccagagtcgggggaccccattcagcc

SEQ ID NO: 32654 - RNA, 82 nt, synthetic construct
  source 1..82: mol_type = other RNA
caccttctccgacaggtcctgccatttcaccaggaacatgtatacctgggggaaagccagagtcgggggaccccattcagcc

SEQ ID NO: 32655 - RNA, 83 nt, synthetic construct
  source 1..83: mol_type = other RNA
ccaccttctccgacaggtcctgccatttcaccaggaacatgtaaacctgggggaaagccagagtcgggggaccccattcagcc

SEQ ID NO: 32656 - RNA, 83 nt, synthetic construct
  source 1..83: mol_type = other RNA
ccaccttctccgacaggtcctgccatttcaccaggaacatgtatacctgggggaaagccagagtcgggggaccccattcagcc

SEQ ID NO: 32657 - RNA, 83 nt, synthetic construct
  source 1..83: mol_type = other RNA
ccaccttctccgacaggtcctgccatttcaccaggaacatgtagacctgggggaaagccagagtcgggggaccccattcagcc

SEQ ID NO: 32658 - RNA, 83 nt, synthetic construct
  source 1..83: mol_type = other RNA
ccaccttctccgacaggtcctgccatttcaccaggaacatgtacacctgggggaaagccagagtcgggggaccccattcagcc

SEQ ID NO: 32659 - RNA, 84 nt, synthetic construct
  source 1..84: mol_type = other RNA
accaccttctccgacaggtcctgccatttcaccaggaacatgtatacctgggggaaagccagagtcgggggaccccattcagcc

SEQ ID NO: 32660 - RNA, 84 nt, synthetic construct
  source 1..84: mol_type = other RNA
accaccttctccgacaggtcctgccatttcaccaggaacatgtacacctgggggaaagccagagtcgggggaccccattcagcc

SEQ ID NO: 32661 - RNA, 84 nt, synthetic construct
  source 1..84: mol_type = other RNA
accaccttctccgacaggtcctgccatttcaccaggaacatgtagacctgggggaaagccagagtcgggggaccccattcagcc

SEQ ID NO: 32662 - RNA, 84 nt, synthetic construct
  source 1..84: mol_type = other RNA
accaccttctccgacaggtcctgccatttcaccaggaacatgtaaacctgggggaaagccagagtcgggggaccccattcagcc

SEQ ID NO: 32663 - RNA, 85 nt, synthetic construct
  source 1..85: mol_type = other RNA
gaccaccttctccgacaggtcctgccatttcaccaggaacatgtaaacctgggggaaagccagagtcgggggaccccattcagcc

SEQ ID NO: 32664 - RNA, 85 nt, synthetic construct
  source 1..85: mol_type = other RNA
gaccaccttctccgacaggtcctgccatttcaccaggaacatgtagacctgggggaaagccagagtcgggggaccccattcagcc

SEQ ID NO: 32665 - RNA, 85 nt, synthetic construct
  source 1..85: mol_type = other RNA
gaccaccttctccgacaggtcctgccatttcaccaggaacatgtacacctgggggaaagccagagtcgggggaccccattcagcc

SEQ ID NO: 32666 - RNA, 85 nt, synthetic construct
  source 1..85: mol_type = other RNA
gaccaccttctccgacaggtcctgccatttcaccaggaacatgtatacctgggggaaagccagagtcgggggaccccattcagcc

SEQ ID NO: 32667 - RNA, 86 nt, synthetic construct
  source 1..86: mol_type = other RNA
agaccaccttctccgacaggtcctgccatttcaccaggaacatgtatacctgggggaaagccagagtcgggggaccccattcagcc

SEQ ID NO: 32668 - RNA, 86 nt, synthetic construct
  source 1..86: mol_type = other RNA
agaccaccttctccgacaggtcctgccatttcaccaggaacatgtaaacctgggggaaagccagagtcgggggaccccattcagcc

SEQ ID NO: 32669 - RNA, 86 nt, synthetic construct
  source 1..86: mol_type = other RNA
agaccaccttctccgacaggtcctgccatttcaccaggaacatgtacacctgggggaaagccagagtcgggggaccccattcagcc

SEQ ID NO: 32670 - RNA, 86 nt, synthetic construct
  source 1..86: mol_type = other RNA
agaccaccttctccgacaggtcctgccatttcaccaggaacatgtagacctgggggaaagccagagtcgggggaccccattcagcc

SEQ ID NO: 32671 - RNA, 87 nt, synthetic construct
  source 1..87: mol_type = other RNA
tagaccaccttctccgacaggtcctgccatttcaccaggaacatgtaaacctgggggaaagccagagtcgggggaccccattcagcc

SEQ ID NO: 32672 - RNA, 87 nt, synthetic construct
  source 1..87: mol_type = other RNA
tagaccaccttctccgacaggtcctgccatttcaccaggaacatgtatacctgggggaaagccagagtcgggggaccccattcagcc

SEQ ID NO: 32673 - RNA, 87 nt, synthetic construct
  source 1..87: mol_type = other RNA
tagaccaccttctccgacaggtcctgccatttcaccaggaacatgtagacctgggggaaagccagagtcgggggaccccattcagcc

SEQ ID NO: 32674 - RNA, 87 nt, synthetic construct
  source 1..87: mol_type = other RNA
tagaccaccttctccgacaggtcctgccatttcaccaggaacatgtacacctgggggaaagccagagtcgggggaccccattcagcc

SEQ ID NO: 32675 - RNA, 88 nt, synthetic construct
  source 1..88: mol_type = other RNA
gtagaccaccttctccgacaggtcctgccatttcaccaggaacatgtagacctgggggaaagccagagtcgggggaccccattcagcc

SEQ ID NO: 32676 - RNA, 88 nt, synthetic construct
  source 1..88: mol_type = other RNA
gtagaccaccttctccgacaggtcctgccatttcaccaggaacatgtacacctgggggaaagccagagtcgggggaccccattcagcc

SEQ ID NO: 32677 - RNA, 88 nt, synthetic construct
  source 1..88: mol_type = other RNA
gtagaccaccttctccgacaggtcctgccatttcaccaggaacatgtaaacctgggggaaagccagagtcgggggaccccattcagcc

SEQ ID NO: 32678 - RNA, 88 nt, synthetic construct
  source 1..88: mol_type = other RNA
gtagaccaccttctccgacaggtcctgccatttcaccaggaacatgtatacctgggggaaagccagagtcgggggaccccattcagcc

SEQ ID NO: 32679 - RNA, 89 nt, synthetic construct
  source 1..89: mol_type = other RNA
ggtagaccaccttctccgacaggtcctgccatttcaccaggaacatgtatacctgggggaaagccagagtcgggggaccccattcagcc

SEQ ID NO: 32680 - RNA, 89 nt, synthetic construct
  source 1..89: mol_type = other RNA
ggtagaccaccttctccgacaggtcctgccatttcaccaggaacatgtacacctgggggaaagccagagtcgggggaccccattcagcc

SEQ ID NO: 32681 - RNA, 89 nt, synthetic construct
  source 1..89: mol_type = other RNA
ggtagaccaccttctccgacaggtcctgccatttcaccaggaacatgtagacctgggggaaagccagagtcgggggaccccattcagcc

SEQ ID NO: 32682 - RNA, 89 nt, synthetic construct
  source 1..89: mol_type = other RNA
ggtagaccaccttctccgacaggtcctgccatttcaccaggaacatgtaaacctgggggaaagccagagtcgggggaccccattcagcc

SEQ ID NO: 32683 - RNA, 90 nt, synthetic construct
  source 1..90: mol_type = other RNA
cggtagaccaccttctccgacaggtcctgccatttcaccaggaacatgtatacctgggggaaagccagagtcgggggaccccattcagcc

SEQ ID NO: 32684 - RNA, 90 nt, synthetic construct
  source 1..90: mol_type = other RNA
cggtagaccaccttctccgacaggtcctgccatttcaccaggaacatgtagacctgggggaaagccagagtcgggggaccccattcagcc

SEQ ID NO: 32685 - RNA, 90 nt, synthetic construct
  source 1..90: mol_type = other RNA
cggtagaccaccttctccgacaggtcctgccatttcaccaggaacatgtaaacctgggggaaagccagagtcgggggaccccattcagcc

SEQ ID NO: 32686 - RNA, 90 nt, synthetic construct
  source 1..90: mol_type = other RNA
cggtagaccaccttctccgacaggtcctgccatttcaccaggaacatgtacacctgggggaaagccagagtcgggggaccccattcagcc

SEQ ID NO: 32687 - RNA, 91 nt, synthetic construct
  source 1..91: mol_type = other RNA
ccggtagaccaccttctccgacaggtcctgccatttcaccaggaacatgtaaacctgggggaaagccagagtcgggggaccccattcagcc

SEQ ID NO: 32688 - RNA, 91 nt, synthetic construct
  source 1..91: mol_type = other RNA
ccggtagaccaccttctccgacaggtcctgccatttcaccaggaacatgtagacctgggggaaagccagagtcgggggaccccattcagcc

SEQ ID NO: 32689 - RNA, 91 nt, synthetic construct
  source 1..91: mol_type = other RNA
ccggtagaccaccttctccgacaggtcctgccatttcaccaggaacatgtacacctgggggaaagccagagtcgggggaccccattcagcc

SEQ ID NO: 32690 - RNA, 91 nt, synthetic construct
  source 1..91: mol_type = other RNA
ccggtagaccaccttctccgacaggtcctgccatttcaccaggaacatgtatacctgggggaaagccagagtcgggggaccccattcagcc

SEQ ID NO: 32691 - RNA, 92 nt, synthetic construct
  source 1..92: mol_type = other RNA
gccggtagaccaccttctccgacaggtcctgccatttcaccaggaacatgtagacctgggggaaagccagagtcgggggaccccattcagcc

SEQ ID NO: 32692 - RNA, 92 nt, synthetic construct
  source 1..92: mol_type = other RNA
gccggtagaccaccttctccgacaggtcctgccatttcaccaggaacatgtatacctgggggaaagccagagtcgggggaccccattcagcc

SEQ ID NO: 32693 - RNA, 92 nt, synthetic construct
  source 1..92: mol_type = other RNA
gccggtagaccaccttctccgacaggtcctgccatttcaccaggaacatgtacacctgggggaaagccagagtcgggggaccccattcagcc

SEQ ID NO: 32694 - RNA, 92 nt, synthetic construct
  source 1..92: mol_type = other RNA
gccggtagaccaccttctccgacaggtcctgccatttcaccaggaacatgtaaacctgggggaaagccagagtcgggggaccccattcagcc

SEQ ID NO: 32695 - RNA, 93 nt, synthetic construct
  source 1..93: mol_type = other RNA
cgccggtagaccaccttctccgacaggtcctgccatttcaccaggaacatgtacacctgggggaaagccagagtcgggggaccccattcagcc

SEQ ID NO: 32696 - RNA, 93 nt, synthetic construct
  source 1..93: mol_type = other RNA
cgccggtagaccaccttctccgacaggtcctgccatttcaccaggaacatgtagacctgggggaaagccagagtcgggggaccccattcagcc

SEQ ID NO: 32697 - RNA, 93 nt, synthetic construct
  source 1..93: mol_type = other RNA
cgccggtagaccaccttctccgacaggtcctgccatttcaccaggaacatgtaaacctgggggaaagccagagtcgggggaccccattcagcc

SEQ ID NO: 32698 - RNA, 93 nt, synthetic construct
  source 1..93: mol_type = other RNA
cgccggtagaccaccttctccgacaggtcctgccatttcaccaggaacatgtatacctgggggaaagccagagtcgggggaccccattcagcc

SEQ ID NO: 32699 - RNA, 94 nt, synthetic construct
  source 1..94: mol_type = other RNA
gcgccggtagaccaccttctccgacaggtcctgccatttcaccaggaacatgtatacctgggggaaagccagagtcgggggaccccattcagcc

SEQ ID NO: 32700 - RNA, 94 nt, synthetic construct
  source 1..94: mol_type = other RNA
gcgccggtagaccaccttctccgacaggtcctgccatttcaccaggaacatgtaaacctgggggaaagccagagtcgggggaccccattcagcc

SEQ ID NO: 32701 - RNA, 94 nt, synthetic construct
  source 1..94: mol_type = other RNA
gcgccggtagaccaccttctccgacaggtcctgccatttcaccaggaacatgtacacctgggggaaagccagagtcgggggaccccattcagcc

SEQ ID NO: 32702 - RNA, 94 nt, synthetic construct
  source 1..94: mol_type = other RNA
gcgccggtagaccaccttctccgacaggtcctgccatttcaccaggaacatgtagacctgggggaaagccagagtcgggggaccccattcagcc

SEQ ID NO: 32703 - RNA, 95 nt, synthetic construct
  source 1..95: mol_type = other RNA
agcgccggtagaccaccttctccgacaggtcctgccatttcaccaggaacatgtaaacctgggggaaagccagagtcgggggaccccattcagcc

SEQ ID NO: 32704 - RNA, 95 nt, synthetic construct
  source 1..95: mol_type = other RNA
agcgccggtagaccaccttctccgacaggtcctgccatttcaccaggaacatgtacacctgggggaaagccagagtcgggggaccccattcagcc

SEQ ID NO: 32705 - RNA, 95 nt, synthetic construct
  source 1..95: mol_type = other RNA
agcgccggtagaccaccttctccgacaggtcctgccatttcaccaggaacatgtagacctgggggaaagccagagtcgggggaccccattcagcc

SEQ ID NO: 32706 - RNA, 95 nt, synthetic construct
  source 1..95: mol_type = other RNA
agcgccggtagaccaccttctccgacaggtcctgccatttcaccaggaacatgtatacctgggggaaagccagagtcgggggaccccattcagcc

SEQ ID NO: 32707 - RNA, 96 nt, synthetic construct
  source 1..96: mol_type = other RNA
aagcgccggtagaccaccttctccgacaggtcctgccatttcaccaggaacatgtaaacctgggggaaagccagagtcgggggaccccattcagcc

SEQ ID NO: 32708 - RNA, 96 nt, synthetic construct
  source 1..96: mol_type = other RNA
aagcgccggtagaccaccttctccgacaggtcctgccatttcaccaggaacatgtagacctgggggaaagccagagtcgggggaccccattcagcc

SEQ ID NO: 32709 - RNA, 96 nt, synthetic construct
  source 1..96: mol_type = other RNA
aagcgccggtagaccaccttctccgacaggtcctgccatttcaccaggaacatgtacacctgggggaaagccagagtcgggggaccccattcagcc

SEQ ID NO: 32710 - RNA, 96 nt, synthetic construct
  source 1..96: mol_type = other RNA
aagcgccggtagaccaccttctccgacaggtcctgccatttcaccaggaacatgtatacctgggggaaagccagagtcgggggaccccattcagcc

SEQ ID NO: 32711 - RNA, 97 nt, synthetic construct
  source 1..97: mol_type = other RNA
gaagcgccggtagaccaccttctccgacaggtcctgccatttcaccaggaacatgtatacctgggggaaagccagagtcgggggaccccattcagcc

SEQ ID NO: 32712 - RNA, 97 nt, synthetic construct
  source 1..97: mol_type = other RNA
gaagcgccggtagaccaccttctccgacaggtcctgccatttcaccaggaacatgtaaacctgggggaaagccagagtcgggggaccccattcagcc

SEQ ID NO: 32713 - RNA, 97 nt, synthetic construct
  source 1..97: mol_type = other RNA
gaagcgccggtagaccaccttctccgacaggtcctgccatttcaccaggaacatgtacacctgggggaaagccagagtcgggggaccccattcagcc

SEQ ID NO: 32714 - RNA, 97 nt, synthetic construct
  source 1..97: mol_type = other RNA
gaagcgccggtagaccaccttctccgacaggtcctgccatttcaccaggaacatgtagacctgggggaaagccagagtcgggggaccccattcagcc

SEQ ID NO: 32715 - RNA, 98 nt, synthetic construct
  source 1..98: mol_type = other RNA
tgaagcgccggtagaccaccttctccgacaggtcctgccatttcaccaggaacatgtagacctgggggaaagccagagtcgggggaccccattcagcc

SEQ ID NO: 32716 - RNA, 98 nt, synthetic construct
  source 1..98: mol_type = other RNA
tgaagcgccggtagaccaccttctccgacaggtcctgccatttcaccaggaacatgtatacctgggggaaagccagagtcgggggaccccattcagcc

SEQ ID NO: 32717 - RNA, 98 nt, synthetic construct
  source 1..98: mol_type = other RNA
tgaagcgccggtagaccaccttctccgacaggtcctgccatttcaccaggaacatgtaaacctgggggaaagccagagtcgggggaccccattcagcc

SEQ ID NO: 32718 - RNA, 98 nt, synthetic construct
  source 1..98: mol_type = other RNA
tgaagcgccggtagaccaccttctccgacaggtcctgccatttcaccaggaacatgtacacctgggggaaagccagagtcgggggaccccattcagcc

SEQ ID NO: 32719 - RNA, 99 nt, synthetic construct
  source 1..99: mol_type = other RNA
gtgaagcgccggtagaccaccttctccgacaggtcctgccatttcaccaggaacatgtagacctgggggaaagccagagtcgggggaccccattcagcc

SEQ ID NO: 32720 - RNA, 99 nt, synthetic construct
  source 1..99: mol_type = other RNA
gtgaagcgccggtagaccaccttctccgacaggtcctgccatttcaccaggaacatgtacacctgggggaaagccagagtcgggggaccccattcagcc

SEQ ID NO: 32721 - RNA, 99 nt, synthetic construct
  source 1..99: mol_type = other RNA
gtgaagcgccggtagaccaccttctccgacaggtcctgccatttcaccaggaacatgtatacctgggggaaagccagagtcgggggaccccattcagcc

SEQ ID NO: 32722 - RNA, 99 nt, synthetic construct
  source 1..99: mol_type = other RNA
gtgaagcgccggtagaccaccttctccgacaggtcctgccatttcaccaggaacatgtaaacctgggggaaagccagagtcgggggaccccattcagcc

SEQ ID NO: 32723 - RNA, 100 nt, synthetic construct
  source 1..100: mol_type = other RNA
ggtgaagcgccggtagaccaccttctccgacaggtcctgccatttcaccaggaacatgtacacctgggggaaagccagagtcgggggaccccattcagcc

SEQ ID NO: 32724 - RNA, 100 nt, synthetic construct
  source 1..100: mol_type = other RNA
ggtgaagcgccggtagaccaccttctccgacaggtcctgccatttcaccaggaacatgtaaacctgggggaaagccagagtcgggggaccccattcagcc

SEQ ID NO: 32725 - RNA, 100 nt, synthetic construct
  source 1..100: mol_type = other RNA
ggtgaagcgccggtagaccaccttctccgacaggtcctgccatttcaccaggaacatgtagacctgggggaaagccagagtcgggggaccccattcagcc

SEQ ID NO: 32726 - RNA, 100 nt, synthetic construct
  source 1..100: mol_type = other RNA
ggtgaagcgccggtagaccaccttctccgacaggtcctgccatttcaccaggaacatgtatacctgggggaaagccagagtcgggggaccccattcagcc

SEQ ID NO: 32727 - RNA, 101 nt, synthetic construct
  source 1..101: mol_type = other RNA
cggtgaagcgccggtagaccaccttctccgacaggtcctgccatttcaccaggaacatgtagacctgggggaaagccagagtcgggggaccccattcagcc

SEQ ID NO: 32728 - RNA, 101 nt, synthetic construct
  source 1..101: mol_type = other RNA
cggtgaagcgccggtagaccaccttctccgacaggtcctgccatttcaccaggaacatgtacacctgggggaaagccagagtcgggggaccccattcagcc

SEQ ID NO: 32729 - RNA, 101 nt, synthetic construct
  source 1..101: mol_type = other RNA
cggtgaagcgccggtagaccaccttctccgacaggtcctgccatttcaccaggaacatgtatacctgggggaaagccagagtcgggggaccccattcagcc

SEQ ID NO: 32730 - RNA, 101 nt, synthetic construct
  source 1..101: mol_type = other RNA
cggtgaagcgccggtagaccaccttctccgacaggtcctgccatttcaccaggaacatgtaaacctgggggaaagccagagtcgggggaccccattcagcc

SEQ ID NO: 32731 - RNA, 102 nt, synthetic construct
  source 1..102: mol_type = other RNA
tcggtgaagcgccggtagaccaccttctccgacaggtcctgccatttcaccaggaacatgtatacctgggggaaagccagagtcgggggaccccattcagcc

SEQ ID NO: 32732 - RNA, 102 nt, synthetic construct
  source 1..102: mol_type = other RNA
tcggtgaagcgccggtagaccaccttctccgacaggtcctgccatttcaccaggaacatgtagacctgggggaaagccagagtcgggggaccccattcagcc

SEQ ID NO: 32733 - RNA, 102 nt, synthetic construct
  source 1..102: mol_type = other RNA
tcggtgaagcgccggtagaccaccttctccgacaggtcctgccatttcaccaggaacatgtacacctgggggaaagccagagtcgggggaccccattcagcc

SEQ ID NO: 32734 - RNA, 102 nt, synthetic construct
  source 1..102: mol_type = other RNA
tcggtgaagcgccggtagaccaccttctccgacaggtcctgccatttcaccaggaacatgtaaacctgggggaaagccagagtcgggggaccccattcagcc

SEQ ID NO: 32735 - RNA, 103 nt, synthetic construct
  source 1..103: mol_type = other RNA
ctcggtgaagcgccggtagaccaccttctccgacaggtcctgccatttcaccaggaacatgtacacctgggggaaagccagagtcgggggaccccattcagcc

SEQ ID NO: 32736 - RNA, 103 nt, synthetic construct
  source 1..103: mol_type = other RNA
ctcggtgaagcgccggtagaccaccttctccgacaggtcctgccatttcaccaggaacatgtatacctgggggaaagccagagtcgggggaccccattcagcc

SEQ ID NO: 32737 - RNA, 103 nt, synthetic construct
  source 1..103: mol_type = other RNA
ctcggtgaagcgccggtagaccaccttctccgacaggtcctgccatttcaccaggaacatgtaaacctgggggaaagccagagtcgggggaccccattcagcc

SEQ ID NO: 32738 - RNA, 103 nt, synthetic construct
  source 1..103: mol_type = other RNA
ctcggtgaagcgccggtagaccaccttctccgacaggtcctgccatttcaccaggaacatgtagacctgggggaaagccagagtcgggggaccccattcagcc

SEQ ID NO: 32739 - RNA, 16 nt, synthetic construct
  source 1..16: mol_type = other RNA
cttctccgacaggtcc

SEQ ID NO: 32740 - RNA, 17 nt, synthetic construct
  source 1..17: mol_type = other RNA
ccttctccgacaggtcc

SEQ ID NO: 32741 - RNA, 18 nt, synthetic construct
  source 1..18: mol_type = other RNA
accttctccgacaggtcc

SEQ ID NO: 32742 - RNA, 19 nt, synthetic construct
  source 1..19: mol_type = other RNA
caccttctccgacaggtcc

SEQ ID NO: 32743 - RNA, 20 nt, synthetic construct
  source 1..20: mol_type = other RNA
ccaccttctccgacaggtcc

SEQ ID NO: 32744 - RNA, 21 nt, synthetic construct
  source 1..21: mol_type = other RNA
accaccttctccgacaggtcc

SEQ ID NO: 32745 - RNA, 22 nt, synthetic construct
  source 1..22: mol_type = other RNA
gaccaccttctccgacaggtcc

SEQ ID NO: 32746-32752 - skipped (7 entries)

SEQ ID NO: 32753 - RNA, 10 nt, synthetic construct
  source 1..10: mol_type = other RNA
cctgtcggag

SEQ ID NO: 32754 - RNA, 11 nt, synthetic construct
  source 1..11: mol_type = other RNA
cctgtcggaga

SEQ ID NO: 32755 - RNA, 12 nt, synthetic construct
  source 1..12: mol_type = other RNA
cctgtcggagaa

SEQ ID NO: 32756 - RNA, 13 nt, synthetic construct
  source 1..13: mol_type = other RNA
cctgtcggagaag

SEQ ID NO: 32757 - RNA, 14 nt, synthetic construct
  source 1..14: mol_type = other RNA
cctgtcggagaagg

SEQ ID NO: 32758 - RNA, 15 nt, synthetic construct
  source 1..15: mol_type = other RNA
cctgtcggagaaggt

SEQ ID NO: 32759 - RNA, 16 nt, synthetic construct
  source 1..16: mol_type = other RNA
cctgtcggagaaggtg

SEQ ID NO: 32760 - RNA, 17 nt, synthetic construct
  source 1..17: mol_type = other RNA
cctgtcggagaaggtgg

SEQ ID NO: 32761 - RNA, 18 nt, synthetic construct
  source 1..18: mol_type = other RNA
cctgtcggagaaggtggt

SEQ ID NO: 32762 - RNA, 19 nt, synthetic construct
  source 1..19: mol_type = other RNA
cctgtcggagaaggtggtc

SEQ ID NO: 32763 - RNA, 29 nt, synthetic construct
  source 1..29: mol_type = other RNA
gtgtacatgttcctggtgaaatggcagga

SEQ ID NO: 32764 - RNA, 29 nt, synthetic construct
  source 1..29: mol_type = other RNA
gtttacatgttcctggtgaaatggcagga

SEQ ID NO: 32765 - RNA, 29 nt, synthetic construct
  source 1..29: mol_type = other RNA
gtctacatgttcctggtgaaatggcagga

SEQ ID NO: 32766 - RNA, 29 nt, synthetic construct
  source 1..29: mol_type = other RNA
gtatacatgttcctggtgaaatggcagga

SEQ ID NO: 32767 - RNA, 30 nt, synthetic construct
  source 1..30: mol_type = other RNA
ggtatacatgttcctggtgaaatggcagga

SEQ ID NO: 32768 - RNA, 30 nt, synthetic construct
  source 1..30: mol_type = other RNA
ggtctacatgttcctggtgaaatggcagga

SEQ ID NO: 32769 - RNA, 30 nt, synthetic construct
  source 1..30: mol_type = other RNA
ggtgtacatgttcctggtgaaatggcagga

SEQ ID NO: 32770 - RNA, 30 nt, synthetic construct
  source 1..30: mol_type = other RNA
ggtttacatgttcctggtgaaatggcagga

SEQ ID NO: 32771 - RNA, 31 nt, synthetic construct
  source 1..31: mol_type = other RNA
aggtatacatgttcctggtgaaatggcagga

SEQ ID NO: 32772 - RNA, 31 nt, synthetic construct
  source 1..31: mol_type = other RNA
aggtttacatgttcctggtgaaatggcagga

SEQ ID NO: 32773 - RNA, 31 nt, synthetic construct
  source 1..31: mol_type = other RNA
aggtgtacatgttcctggtgaaatggcagga

SEQ ID NO: 32774 - RNA, 31 nt, synthetic construct
  source 1..31: mol_type = other RNA
aggtctacatgttcctggtgaaatggcagga

SEQ ID NO: 32775 - RNA, 32 nt, synthetic construct
  source 1..32: mol_type = other RNA
caggtatacatgttcctggtgaaatggcagga

SEQ ID NO: 32776 - RNA, 32 nt, synthetic construct
  source 1..32: mol_type = other RNA
caggtctacatgttcctggtgaaatggcagga

SEQ ID NO: 32777 - RNA, 32 nt, synthetic construct
  source 1..32: mol_type = other RNA
caggtttacatgttcctggtgaaatggcagga

SEQ ID NO: 32778 - RNA, 32 nt, synthetic construct
  source 1..32: mol_type = other RNA
caggtgtacatgttcctggtgaaatggcagga

SEQ ID NO: 32779 - RNA, 33 nt, synthetic construct
  source 1..33: mol_type = other RNA
ccaggtctacatgttcctggtgaaatggcagga

SEQ ID NO: 32780 - RNA, 33 nt, synthetic construct
  source 1..33: mol_type = other RNA
ccaggtatacatgttcctggtgaaatggcagga

SEQ ID NO: 32781 - RNA, 33 nt, synthetic construct
  source 1..33: mol_type = other RNA
ccaggtttacatgttcctggtgaaatggcagga

SEQ ID NO: 32782 - RNA, 33 nt, synthetic construct
  source 1..33: mol_type = other RNA
ccaggtgtacatgttcctggtgaaatggcagga

SEQ ID NO: 32783 - RNA, 34 nt, synthetic construct
  source 1..34: mol_type = other RNA
cccaggtttacatgttcctggtgaaatggcagga

SEQ ID NO: 32784 - RNA, 34 nt, synthetic construct
  source 1..34: mol_type = other RNA
cccaggtatacatgttcctggtgaaatggcagga

SEQ ID NO: 32785 - RNA, 34 nt, synthetic construct
  source 1..34: mol_type = other RNA
cccaggtgtacatgttcctggtgaaatggcagga

SEQ ID NO: 32786 - RNA, 34 nt, synthetic construct
  source 1..34: mol_type = other RNA
cccaggtctacatgttcctggtgaaatggcagga

SEQ ID NO: 32787 - RNA, 35 nt, synthetic construct
  source 1..35: mol_type = other RNA
ccccaggtatacatgttcctggtgaaatggcagga

SEQ ID NO: 32788 - RNA, 35 nt, synthetic construct
  source 1..35: mol_type = other RNA
ccccaggtctacatgttcctggtgaaatggcagga

SEQ ID NO: 32789 - RNA, 35 nt, synthetic construct
  source 1..35: mol_type = other RNA
ccccaggtgtacatgttcctggtgaaatggcagga

SEQ ID NO: 32790 - RNA, 35 nt, synthetic construct
  source 1..35: mol_type = other RNA
ccccaggtttacatgttcctggtgaaatggcagga

SEQ ID NO: 32791 - RNA, 36 nt, synthetic construct
  source 1..36: mol_type = other RNA
cccccaggtgtacatgttcctggtgaaatggcagga

SEQ ID NO: 32792 - RNA, 36 nt, synthetic construct
  source 1..36: mol_type = other RNA
cccccaggtatacatgttcctggtgaaatggcagga

SEQ ID NO: 32793 - RNA, 36 nt, synthetic construct
  source 1..36: mol_type = other RNA
cccccaggtttacatgttcctggtgaaatggcagga

SEQ ID NO: 32794 - RNA, 36 nt, synthetic construct
  source 1..36: mol_type = other RNA
cccccaggtctacatgttcctggtgaaatggcagga

SEQ ID NO: 32795 - RNA, 37 nt, synthetic construct
  source 1..37: mol_type = other RNA
tcccccaggtctacatgttcctggtgaaatggcagga

SEQ ID NO: 32796 - RNA, 37 nt, synthetic construct
  source 1..37: mol_type = other RNA
tcccccaggtttacatgttcctggtgaaatggcagga

SEQ ID NO: 32797 - RNA, 37 nt, synthetic construct
  source 1..37: mol_type = other RNA
tcccccaggtgtacatgttcctggtgaaatggcagga

SEQ ID NO: 32798 - RNA, 37 nt, synthetic construct
  source 1..37: mol_type = other RNA
tcccccaggtatacatgttcctggtgaaatggcagga

SEQ ID NO: 32799 - RNA, 38 nt, synthetic construct
  source 1..38: mol_type = other RNA
ttcccccaggtttacatgttcctggtgaaatggcagga

SEQ ID NO: 32800 - RNA, 38 nt, synthetic construct
  source 1..38: mol_type = other RNA
ttcccccaggtgtacatgttcctggtgaaatggcagga

SEQ ID NO: 32801 - RNA, 38 nt, synthetic construct
  source 1..38: mol_type = other RNA
ttcccccaggtatacatgttcctggtgaaatggcagga

SEQ ID NO: 32802 - RNA, 38 nt, synthetic construct
  source 1..38: mol_type = other RNA
ttcccccaggtctacatgttcctggtgaaatggcagga

SEQ ID NO: 32803 - RNA, 39 nt, synthetic construct
  source 1..39: mol_type = other RNA
tttcccccaggtatacatgttcctggtgaaatggcagga

SEQ ID NO: 32804 - RNA, 39 nt, synthetic construct
  source 1..39: mol_type = other RNA
tttcccccaggtttacatgttcctggtgaaatggcagga

SEQ ID NO: 32805 - RNA, 39 nt, synthetic construct
  source 1..39: mol_type = other RNA
tttcccccaggtctacatgttcctggtgaaatggcagga

SEQ ID NO: 32806 - RNA, 39 nt, synthetic construct
  source 1..39: mol_type = other RNA
tttcccccaggtgtacatgttcctggtgaaatggcagga

SEQ ID NO: 32807 - RNA, 40 nt, synthetic construct
  source 1..40: mol_type = other RNA
ctttcccccaggtctacatgttcctggtgaaatggcagga

SEQ ID NO: 32808 - RNA, 40 nt, synthetic construct
  source 1..40: mol_type = other RNA
ctttcccccaggtttacatgttcctggtgaaatggcagga

SEQ ID NO: 32809 - RNA, 40 nt, synthetic construct
  source 1..40: mol_type = other RNA
ctttcccccaggtgtacatgttcctggtgaaatggcagga

SEQ ID NO: 32810 - RNA, 40 nt, synthetic construct
  source 1..40: mol_type = other RNA
ctttcccccaggtatacatgttcctggtgaaatggcagga

SEQ ID NO: 32811 - RNA, 41 nt, synthetic construct
  source 1..41: mol_type = other RNA
gctttcccccaggtctacatgttcctggtgaaatggcagga

SEQ ID NO: 32812 - RNA, 41 nt, synthetic construct
  source 1..41: mol_type = other RNA
gctttcccccaggtgtacatgttcctggtgaaatggcagga

SEQ ID NO: 32813 - RNA, 41 nt, synthetic construct
  source 1..41: mol_type = other RNA
gctttcccccaggtttacatgttcctggtgaaatggcagga

SEQ ID NO: 32814 - RNA, 41 nt, synthetic construct
  source 1..41: mol_type = other RNA
gctttcccccaggtatacatgttcctggtgaaatggcagga

SEQ ID NO: 32815 - RNA, 42 nt, synthetic construct
  source 1..42: mol_type = other RNA
ggctttcccccaggtatacatgttcctggtgaaatggcagga

SEQ ID NO: 32816 - RNA, 42 nt, synthetic construct
  source 1..42: mol_type = other RNA
ggctttcccccaggtgtacatgttcctggtgaaatggcagga

SEQ ID NO: 32817 - RNA, 42 nt, synthetic construct
  source 1..42: mol_type = other RNA
ggctttcccccaggtctacatgttcctggtgaaatggcagga

SEQ ID NO: 32818 - RNA, 42 nt, synthetic construct
  source 1..42: mol_type = other RNA
ggctttcccccaggtttacatgttcctggtgaaatggcagga

SEQ ID NO: 32819 - RNA, 43 nt, synthetic construct
  source 1..43: mol_type = other RNA
tggctttcccccaggtttacatgttcctggtgaaatggcagga

SEQ ID NO: 32820 - RNA, 43 nt, synthetic construct
  source 1..43: mol_type = other RNA
tggctttcccccaggtatacatgttcctggtgaaatggcagga

SEQ ID NO: 32821 - RNA, 43 nt, synthetic construct
  source 1..43: mol_type = other RNA
tggctttcccccaggtctacatgttcctggtgaaatggcagga

SEQ ID NO: 32822 - RNA, 43 nt, synthetic construct
  source 1..43: mol_type = other RNA
tggctttcccccaggtgtacatgttcctggtgaaatggcagga

SEQ ID NO: 32823 - RNA, 44 nt, synthetic construct
  source 1..44: mol_type = other RNA
ctggctttcccccaggtatacatgttcctggtgaaatggcagga

SEQ ID NO: 32824 - RNA, 44 nt, synthetic construct
  source 1..44: mol_type = other RNA
ctggctttcccccaggtctacatgttcctggtgaaatggcagga

SEQ ID NO: 32825 - RNA, 44 nt, synthetic construct
  source 1..44: mol_type = other RNA
ctggctttcccccaggtgtacatgttcctggtgaaatggcagga

SEQ ID NO: 32826 - RNA, 44 nt, synthetic construct
  source 1..44: mol_type = other RNA
ctggctttcccccaggtttacatgttcctggtgaaatggcagga

SEQ ID NO: 32827 - RNA, 45 nt, synthetic construct
  source 1..45: mol_type = other RNA
tctggctttcccccaggtatacatgttcctggtgaaatggcagga

SEQ ID NO: 32828 - RNA, 45 nt, synthetic construct
  source 1..45: mol_type = other RNA
tctggctttcccccaggtctacatgttcctggtgaaatggcagga

SEQ ID NO: 32829 - RNA, 45 nt, synthetic construct
  source 1..45: mol_type = other RNA
tctggctttcccccaggtgtacatgttcctggtgaaatggcagga

SEQ ID NO: 32830 - RNA, 45 nt, synthetic construct
  source 1..45: mol_type = other RNA
tctggctttcccccaggtttacatgttcctggtgaaatggcagga

SEQ ID NO: 32831 - RNA, 46 nt, synthetic construct
  source 1..46: mol_type = other RNA
ctctggctttcccccaggtgtacatgttcctggtgaaatggcagga

SEQ ID NO: 32832 - RNA, 46 nt, synthetic construct
  source 1..46: mol_type = other RNA
ctctggctttcccccaggtttacatgttcctggtgaaatggcagga

SEQ ID NO: 32833 - RNA, 46 nt, synthetic construct
  source 1..46: mol_type = other RNA
ctctggctttcccccaggtatacatgttcctggtgaaatggcagga

SEQ ID NO: 32834 - RNA, 46 nt, synthetic construct
  source 1..46: mol_type = other RNA
ctctggctttcccccaggtctacatgttcctggtgaaatggcagga

SEQ ID NO: 32835 - RNA, 47 nt, synthetic construct
  source 1..47: mol_type = other RNA
actctggctttcccccaggtgtacatgttcctggtgaaatggcagga

SEQ ID NO: 32836 - RNA, 47 nt, synthetic construct
  source 1..47: mol_type = other RNA
actctggctttcccccaggtctacatgttcctggtgaaatggcagga

SEQ ID NO: 32837 - RNA, 47 nt, synthetic construct
  source 1..47: mol_type = other RNA
actctggctttcccccaggtttacatgttcctggtgaaatggcagga

SEQ ID NO: 32838 - RNA, 47 nt, synthetic construct
  source 1..47: mol_type = other RNA
actctggctttcccccaggtatacatgttcctggtgaaatggcagga

SEQ ID NO: 32839 - RNA, 48 nt, synthetic construct
  source 1..48: mol_type = other RNA
gactctggctttcccccaggtatacatgttcctggtgaaatggcagga

SEQ ID NO: 32840 - RNA, 48 nt, synthetic construct
  source 1..48: mol_type = other RNA
gactctggctttcccccaggtgtacatgttcctggtgaaatggcagga

SEQ ID NO: 32841 - RNA, 48 nt, synthetic construct
  source 1..48: mol_type = other RNA
gactctggctttcccccaggtctacatgttcctggtgaaatggcagga

SEQ ID NO: 32842 - RNA, 48 nt, synthetic construct
  source 1..48: mol_type = other RNA
gactctggctttcccccaggtttacatgttcctggtgaaatggcagga

SEQ ID NO: 32843 - RNA, 49 nt, synthetic construct
  source 1..49: mol_type = other RNA
cgactctggctttcccccaggtttacatgttcctggtgaaatggcagga

SEQ ID NO: 32844 - RNA, 49 nt, synthetic construct
  source 1..49: mol_type = other RNA
cgactctggctttcccccaggtatacatgttcctggtgaaatggcagga

SEQ ID NO: 32845 - RNA, 49 nt, synthetic construct
  source 1..49: mol_type = other RNA
cgactctggctttcccccaggtctacatgttcctggtgaaatggcagga

SEQ ID NO: 32846 - RNA, 49 nt, synthetic construct
  source 1..49: mol_type = other RNA
cgactctggctttcccccaggtgtacatgttcctggtgaaatggcagga

SEQ ID NO: 32847 - RNA, 50 nt, synthetic construct
  source 1..50: mol_type = other RNA
ccgactctggctttcccccaggtttacatgttcctggtgaaatggcagga

SEQ ID NO: 32848 - RNA, 50 nt, synthetic construct
  source 1..50: mol_type = other RNA
ccgactctggctttcccccaggtgtacatgttcctggtgaaatggcagga

SEQ ID NO: 32849 - RNA, 50 nt, synthetic construct
  source 1..50: mol_type = other RNA
ccgactctggctttcccccaggtatacatgttcctggtgaaatggcagga

SEQ ID NO: 32850 - RNA, 50 nt, synthetic construct
  source 1..50: mol_type = other RNA
ccgactctggctttcccccaggtctacatgttcctggtgaaatggcagga

SEQ ID NO: 32851 - RNA, 51 nt, synthetic construct
  source 1..51: mol_type = other RNA
cccgactctggctttcccccaggtatacatgttcctggtgaaatggcagga

SEQ ID NO: 32852 - RNA, 51 nt, synthetic construct
  source 1..51: mol_type = other RNA
cccgactctggctttcccccaggtctacatgttcctggtgaaatggcagga

SEQ ID NO: 32853 - RNA, 51 nt, synthetic construct
  source 1..51: mol_type = other RNA
cccgactctggctttcccccaggtttacatgttcctggtgaaatggcagga

SEQ ID NO: 32854 - RNA, 51 nt, synthetic construct
  source 1..51: mol_type = other RNA
cccgactctggctttcccccaggtgtacatgttcctggtgaaatggcagga

SEQ ID NO: 32855 - RNA, 52 nt, synthetic construct
  source 1..52: mol_type = other RNA
ccccgactctggctttcccccaggtctacatgttcctggtgaaatggcagga

SEQ ID NO: 32856 - RNA, 52 nt, synthetic construct
  source 1..52: mol_type = other RNA
ccccgactctggctttcccccaggtgtacatgttcctggtgaaatggcagga

SEQ ID NO: 32857 - RNA, 52 nt, synthetic construct
  source 1..52: mol_type = other RNA
ccccgactctggctttcccccaggtatacatgttcctggtgaaatggcagga

SEQ ID NO: 32858 - RNA, 52 nt, synthetic construct
  source 1..52: mol_type = other RNA
ccccgactctggctttcccccaggtttacatgttcctggtgaaatggcagga

SEQ ID NO: 32859 - RNA, 53 nt, synthetic construct
  source 1..53: mol_type = other RNA
cccccgactctggctttcccccaggtgtacatgttcctggtgaaatggcagga

SEQ ID NO: 32860 - RNA, 53 nt, synthetic construct
  source 1..53: mol_type = other RNA
cccccgactctggctttcccccaggtctacatgttcctggtgaaatggcagga

SEQ ID NO: 32861 - RNA, 53 nt, synthetic construct
  source 1..53: mol_type = other RNA
cccccgactctggctttcccccaggtttacatgttcctggtgaaatggcagga

SEQ ID NO: 32862 - RNA, 53 nt, synthetic construct
  source 1..53: mol_type = other RNA
cccccgactctggctttcccccaggtatacatgttcctggtgaaatggcagga

SEQ ID NO: 32863 - RNA, 54 nt, synthetic construct
  source 1..54: mol_type = other RNA
tcccccgactctggctttcccccaggtatacatgttcctggtgaaatggcagga

SEQ ID NO: 32864 - RNA, 54 nt, synthetic construct
  source 1..54: mol_type = other RNA
tcccccgactctggctttcccccaggtctacatgttcctggtgaaatggcagga

SEQ ID NO: 32865 - RNA, 54 nt, synthetic construct
  source 1..54: mol_type = other RNA
tcccccgactctggctttcccccaggtgtacatgttcctggtgaaatggcagga

SEQ ID NO: 32866 - RNA, 54 nt, synthetic construct
  source 1..54: mol_type = other RNA
tcccccgactctggctttcccccaggtttacatgttcctggtgaaatggcagga

SEQ ID NO: 32867 - RNA, 55 nt, synthetic construct
  source 1..55: mol_type = other RNA
gtcccccgactctggctttcccccaggtctacatgttcctggtgaaatggcagga

SEQ ID NO: 32868 - RNA, 55 nt, synthetic construct
  source 1..55: mol_type = other RNA
gtcccccgactctggctttcccccaggtgtacatgttcctggtgaaatggcagga

SEQ ID NO: 32869 - RNA, 55 nt, synthetic construct
  source 1..55: mol_type = other RNA
gtcccccgactctggctttcccccaggtttacatgttcctggtgaaatggcagga

SEQ ID NO: 32870 - RNA, 55 nt, synthetic construct
  source 1..55: mol_type = other RNA
gtcccccgactctggctttcccccaggtatacatgttcctggtgaaatggcagga

SEQ ID NO: 32871 - RNA, 56 nt, synthetic construct
  source 1..56: mol_type = other RNA
ggtcccccgactctggctttcccccaggtttacatgttcctggtgaaatggcagga

SEQ ID NO: 32872 - RNA, 56 nt, synthetic construct
  source 1..56: mol_type = other RNA
ggtcccccgactctggctttcccccaggtctacatgttcctggtgaaatggcagga

SEQ ID NO: 32873 - RNA, 56 nt, synthetic construct
  source 1..56: mol_type = other RNA
ggtcccccgactctggctttcccccaggtgtacatgttcctggtgaaatggcagga

SEQ ID NO: 32874 - RNA, 56 nt, synthetic construct
  source 1..56: mol_type = other RNA
ggtcccccgactctggctttcccccaggtatacatgttcctggtgaaatggcagga

SEQ ID NO: 32875 - RNA, 57 nt, synthetic construct
  source 1..57: mol_type = other RNA
gggtcccccgactctggctttcccccaggtatacatgttcctggtgaaatggcagga

SEQ ID NO: 32876 - RNA, 57 nt, synthetic construct
  source 1..57: mol_type = other RNA
gggtcccccgactctggctttcccccaggtttacatgttcctggtgaaatggcagga

SEQ ID NO: 32877 - RNA, 57 nt, synthetic construct
  source 1..57: mol_type = other RNA
gggtcccccgactctggctttcccccaggtgtacatgttcctggtgaaatggcagga

SEQ ID NO: 32878 - RNA, 57 nt, synthetic construct
  source 1..57: mol_type = other RNA
gggtcccccgactctggctttcccccaggtctacatgttcctggtgaaatggcagga

SEQ ID NO: 32879 - RNA, 58 nt, synthetic construct
  source 1..58: mol_type = other RNA
ggggtcccccgactctggctttcccccaggtatacatgttcctggtgaaatggcagga

SEQ ID NO: 32880 - RNA, 58 nt, synthetic construct
  source 1..58: mol_type = other RNA
ggggtcccccgactctggctttcccccaggtgtacatgttcctggtgaaatggcagga

SEQ ID NO: 32881 - RNA, 58 nt, synthetic construct
  source 1..58: mol_type = other RNA
ggggtcccccgactctggctttcccccaggtttacatgttcctggtgaaatggcagga

SEQ ID NO: 32882 - RNA, 58 nt, synthetic construct
  source 1..58: mol_type = other RNA
ggggtcccccgactctggctttcccccaggtctacatgttcctggtgaaatggcagga

SEQ ID NO: 32883 - RNA, 59 nt, synthetic construct
  source 1..59: mol_type = other RNA
tggggtcccccgactctggctttcccccaggtgtacatgttcctggtgaaatggcagga

SEQ ID NO: 32884 - RNA, 59 nt, synthetic construct
  source 1..59: mol_type = other RNA
tggggtcccccgactctggctttcccccaggtttacatgttcctggtgaaatggcagga

SEQ ID NO: 32885 - RNA, 59 nt, synthetic construct
  source 1..59: mol_type = other RNA
tggggtcccccgactctggctttcccccaggtatacatgttcctggtgaaatggcagga

SEQ ID NO: 32886 - RNA, 59 nt, synthetic construct
  source 1..59: mol_type = other RNA
tggggtcccccgactctggctttcccccaggtctacatgttcctggtgaaatggcagga

SEQ ID NO: 32887 - RNA, 60 nt, synthetic construct
  source 1..60: mol_type = other RNA
atggggtcccccgactctggctttcccccaggtttacatgttcctggtgaaatggcagga

SEQ ID NO: 32888 - RNA, 60 nt, synthetic construct
  source 1..60: mol_type = other RNA
atggggtcccccgactctggctttcccccaggtgtacatgttcctggtgaaatggcagga

SEQ ID NO: 32889 - RNA, 60 nt, synthetic construct
  source 1..60: mol_type = other RNA
atggggtcccccgactctggctttcccccaggtctacatgttcctggtgaaatggcagga

SEQ ID NO: 32890 - RNA, 60 nt, synthetic construct
  source 1..60: mol_type = other RNA
atggggtcccccgactctggctttcccccaggtatacatgttcctggtgaaatggcagga

SEQ ID NO: 32891 - RNA, 61 nt, synthetic construct
  source 1..61: mol_type = other RNA
aatggggtcccccgactctggctttcccccaggtttacatgttcctggtgaaatggcagga

SEQ ID NO: 32892 - RNA, 61 nt, synthetic construct
  source 1..61: mol_type = other RNA
aatggggtcccccgactctggctttcccccaggtgtacatgttcctggtgaaatggcagga

SEQ ID NO: 32893 - RNA, 61 nt, synthetic construct
  source 1..61: mol_type = other RNA
aatggggtcccccgactctggctttcccccaggtctacatgttcctggtgaaatggcagga

SEQ ID NO: 32894 - RNA, 61 nt, synthetic construct
  source 1..61: mol_type = other RNA
aatggggtcccccgactctggctttcccccaggtatacatgttcctggtgaaatggcagga

SEQ ID NO: 32895 - RNA, 62 nt, synthetic construct
  source 1..62: mol_type = other RNA
gaatggggtcccccgactctggctttcccccaggtctacatgttcctggtgaaatggcagga

SEQ ID NO: 32896 - RNA, 62 nt, synthetic construct
  source 1..62: mol_type = other RNA
gaatggggtcccccgactctggctttcccccaggtatacatgttcctggtgaaatggcagga

SEQ ID NO: 32897 - RNA, 62 nt, synthetic construct
  source 1..62: mol_type = other RNA
gaatggggtcccccgactctggctttcccccaggtttacatgttcctggtgaaatggcagga

SEQ ID NO: 32898 - RNA, 62 nt, synthetic construct
  source 1..62: mol_type = other RNA
gaatggggtcccccgactctggctttcccccaggtgtacatgttcctggtgaaatggcagga

SEQ ID NO: 32899 - RNA, 63 nt, synthetic construct
  source 1..63: mol_type = other RNA
tgaatggggtcccccgactctggctttcccccaggtttacatgttcctggtgaaatggcagga

SEQ ID NO: 32900 - RNA, 63 nt, synthetic construct
  source 1..63: mol_type = other RNA
tgaatggggtcccccgactctggctttcccccaggtgtacatgttcctggtgaaatggcagga

SEQ ID NO: 32901 - RNA, 63 nt, synthetic construct
  source 1..63: mol_type = other RNA
tgaatggggtcccccgactctggctttcccccaggtatacatgttcctggtgaaatggcagga

SEQ ID NO: 32902 - RNA, 63 nt, synthetic construct
  source 1..63: mol_type = other RNA
tgaatggggtcccccgactctggctttcccccaggtctacatgttcctggtgaaatggcagga

SEQ ID NO: 32903 - RNA, 64 nt, synthetic construct
  source 1..64: mol_type = other RNA
ctgaatggggtcccccgactctggctttcccccaggtgtacatgttcctggtgaaatggcagga

SEQ ID NO: 32904 - RNA, 64 nt, synthetic construct
  source 1..64: mol_type = other RNA
ctgaatggggtcccccgactctggctttcccccaggtttacatgttcctggtgaaatggcagga

SEQ ID NO: 32905 - RNA, 64 nt, synthetic construct
  source 1..64: mol_type = other RNA
ctgaatggggtcccccgactctggctttcccccaggtatacatgttcctggtgaaatggcagga

SEQ ID NO: 32906 - RNA, 64 nt, synthetic construct
  source 1..64: mol_type = other RNA
ctgaatggggtcccccgactctggctttcccccaggtctacatgttcctggtgaaatggcagga

SEQ ID NO: 32907 - RNA, 65 nt, synthetic construct
  source 1..65: mol_type = other RNA
gctgaatggggtcccccgactctggctttcccccaggtttacatgttcctggtgaaatggcagga

SEQ ID NO: 32908 - RNA, 65 nt, synthetic construct
  source 1..65: mol_type = other RNA
gctgaatggggtcccccgactctggctttcccccaggtgtacatgttcctggtgaaatggcagga

SEQ ID NO: 32909 - RNA, 65 nt, synthetic construct
  source 1..65: mol_type = other RNA
gctgaatggggtcccccgactctggctttcccccaggtctacatgttcctggtgaaatggcagga

SEQ ID NO: 32910 - RNA, 65 nt, synthetic construct
  source 1..65: mol_type = other RNA
gctgaatggggtcccccgactctggctttcccccaggtatacatgttcctggtgaaatggcagga

SEQ ID NO: 32911 - RNA, 66 nt, synthetic construct
  source 1..66: mol_type = other RNA
ggctgaatggggtcccccgactctggctttcccccaggtgtacatgttcctggtgaaatggcagga

SEQ ID NO: 32912 - RNA, 66 nt, synthetic construct
  source 1..66: mol_type = other RNA
ggctgaatggggtcccccgactctggctttcccccaggtatacatgttcctggtgaaatggcagga

SEQ ID NO: 32913 - RNA, 66 nt, synthetic construct
  source 1..66: mol_type = other RNA
ggctgaatggggtcccccgactctggctttcccccaggtctacatgttcctggtgaaatggcagga

SEQ ID NO: 32914 - RNA, 66 nt, synthetic construct
  source 1..66: mol_type = other RNA
ggctgaatggggtcccccgactctggctttcccccaggtttacatgttcctggtgaaatggcagga

SEQ ID NO: 32915 - RNA, 67 nt, synthetic construct
  source 1..67: mol_type = other RNA
aggctgaatggggtcccccgactctggctttcccccaggtttacatgttcctggtgaaatggcagga

SEQ ID NO: 32916 - RNA, 67 nt, synthetic construct
  source 1..67: mol_type = other RNA
aggctgaatggggtcccccgactctggctttcccccaggtgtacatgttcctggtgaaatggcagga

SEQ ID NO: 32917 - RNA, 67 nt, synthetic construct
  source 1..67: mol_type = other RNA
aggctgaatggggtcccccgactctggctttcccccaggtctacatgttcctggtgaaatggcagga

SEQ ID NO: 32918 - RNA, 67 nt, synthetic construct
  source 1..67: mol_type = other RNA
aggctgaatggggtcccccgactctggctttcccccaggtatacatgttcctggtgaaatggcagga

SEQ ID NO: 32919 - RNA, 68 nt, synthetic construct
  source 1..68: mol_type = other RNA
gaggctgaatggggtcccccgactctggctttcccccaggtgtacatgttcctggtgaaatggcagga

SEQ ID NO: 32920 - RNA, 68 nt, synthetic construct
  source 1..68: mol_type = other RNA
gaggctgaatggggtcccccgactctggctttcccccaggtttacatgttcctggtgaaatggcagga

SEQ ID NO: 32921 - RNA, 68 nt, synthetic construct
  source 1..68: mol_type = other RNA
gaggctgaatggggtcccccgactctggctttcccccaggtctacatgttcctggtgaaatggcagga

SEQ ID NO: 32922 - RNA, 68 nt, synthetic construct
  source 1..68: mol_type = other RNA
gaggctgaatggggtcccccgactctggctttcccccaggtatacatgttcctggtgaaatggcagga

SEQ ID NO: 32923 - RNA, 69 nt, synthetic construct
  source 1..69: mol_type = other RNA
ggaggctgaatggggtcccccgactctggctttcccccaggtttacatgttcctggtgaaatggcagga

SEQ ID NO: 32924 - RNA, 69 nt, synthetic construct
  source 1..69: mol_type = other RNA
ggaggctgaatggggtcccccgactctggctttcccccaggtgtacatgttcctggtgaaatggcagga

SEQ ID NO: 32925 - RNA, 69 nt, synthetic construct
  source 1..69: mol_type = other RNA
ggaggctgaatggggtcccccgactctggctttcccccaggtatacatgttcctggtgaaatggcagga

SEQ ID NO: 32926 - RNA, 69 nt, synthetic construct
  source 1..69: mol_type = other RNA
ggaggctgaatggggtcccccgactctggctttcccccaggtctacatgttcctggtgaaatggcagga

SEQ ID NO: 32927 - RNA, 70 nt, synthetic construct
  source 1..70: mol_type = other RNA
tggaggctgaatggggtcccccgactctggctttcccccaggtttacatgttcctggtgaaatggcagga

SEQ ID NO: 32928 - RNA, 70 nt, synthetic construct
  source 1..70: mol_type = other RNA
tggaggctgaatggggtcccccgactctggctttcccccaggtgtacatgttcctggtgaaatggcagga

SEQ ID NO: 32929 - RNA, 70 nt, synthetic construct
  source 1..70: mol_type = other RNA
tggaggctgaatggggtcccccgactctggctttcccccaggtctacatgttcctggtgaaatggcagga

SEQ ID NO: 32930 - RNA, 70 nt, synthetic construct
  source 1..70: mol_type = other RNA
tggaggctgaatggggtcccccgactctggctttcccccaggtatacatgttcctggtgaaatggcagga

SEQ ID NO: 32931 - RNA, 71 nt, synthetic construct
  source 1..71: mol_type = other RNA
ttggaggctgaatggggtcccccgactctggctttcccccaggtctacatgttcctggtgaaatggcagga

SEQ ID NO: 32932 - RNA, 71 nt, synthetic construct
  source 1..71: mol_type = other RNA
ttggaggctgaatggggtcccccgactctggctttcccccaggtttacatgttcctggtgaaatggcagga

SEQ ID NO: 32933 - RNA, 71 nt, synthetic construct
  source 1..71: mol_type = other RNA
ttggaggctgaatggggtcccccgactctggctttcccccaggtgtacatgttcctggtgaaatggcagga

SEQ ID NO: 32934 - RNA, 71 nt, synthetic construct
  source 1..71: mol_type = other RNA
ttggaggctgaatggggtcccccgactctggctttcccccaggtatacatgttcctggtgaaatggcagga

SEQ ID NO: 32935 - RNA, 72 nt, synthetic construct
  source 1..72: mol_type = other RNA
tttggaggctgaatggggtcccccgactctggctttcccccaggtatacatgttcctggtgaaatggcagga

SEQ ID NO: 32936 - RNA, 72 nt, synthetic construct
  source 1..72: mol_type = other RNA
tttggaggctgaatggggtcccccgactctggctttcccccaggtttacatgttcctggtgaaatggcagga

SEQ ID NO: 32937 - RNA, 72 nt, synthetic construct
  source 1..72: mol_type = other RNA
tttggaggctgaatggggtcccccgactctggctttcccccaggtgtacatgttcctggtgaaatggcagga

SEQ ID NO: 32938 - RNA, 72 nt, synthetic construct
  source 1..72: mol_type = other RNA
tttggaggctgaatggggtcccccgactctggctttcccccaggtctacatgttcctggtgaaatggcagga

SEQ ID NO: 32939 - RNA, 73 nt, synthetic construct
  source 1..73: mol_type = other RNA
ctttggaggctgaatggggtcccccgactctggctttcccccaggtttacatgttcctggtgaaatggcagga

SEQ ID NO: 32940 - RNA, 73 nt, synthetic construct
  source 1..73: mol_type = other RNA
ctttggaggctgaatggggtcccccgactctggctttcccccaggtatacatgttcctggtgaaatggcagga

SEQ ID NO: 32941 - RNA, 73 nt, synthetic construct
  source 1..73: mol_type = other RNA
ctttggaggctgaatggggtcccccgactctggctttcccccaggtctacatgttcctggtgaaatggcagga

SEQ ID NO: 32942 - RNA, 73 nt, synthetic construct
  source 1..73: mol_type = other RNA
ctttggaggctgaatggggtcccccgactctggctttcccccaggtgtacatgttcctggtgaaatggcagga

SEQ ID NO: 32943 - RNA, 74 nt, synthetic construct
  source 1..74: mol_type = other RNA
tctttggaggctgaatggggtcccccgactctggctttcccccaggtatacatgttcctggtgaaatggcagga

SEQ ID NO: 32944 - RNA, 74 nt, synthetic construct
  source 1..74: mol_type = other RNA
tctttggaggctgaatggggtcccccgactctggctttcccccaggtttacatgttcctggtgaaatggcagga

SEQ ID NO: 32945 - RNA, 74 nt, synthetic construct
  source 1..74: mol_type = other RNA
tctttggaggctgaatggggtcccccgactctggctttcccccaggtctacatgttcctggtgaaatggcagga

SEQ ID NO: 32946 - RNA, 74 nt, synthetic construct
  source 1..74: mol_type = other RNA
tctttggaggctgaatggggtcccccgactctggctttcccccaggtgtacatgttcctggtgaaatggcagga

SEQ ID NO: 32947 - RNA, 75 nt, synthetic construct
  source 1..75: mol_type = other RNA
ctctttggaggctgaatggggtcccccgactctggctttcccccaggtgtacatgttcctggtgaaatggcagga

SEQ ID NO: 32948 - RNA, 75 nt, synthetic construct
  source 1..75: mol_type = other RNA
ctctttggaggctgaatggggtcccccgactctggctttcccccaggtatacatgttcctggtgaaatggcagga

SEQ ID NO: 32949 - RNA, 75 nt, synthetic construct
  source 1..75: mol_type = other RNA
ctctttggaggctgaatggggtcccccgactctggctttcccccaggtctacatgttcctggtgaaatggcagga

SEQ ID NO: 32950 - RNA, 75 nt, synthetic construct
  source 1..75: mol_type = other RNA
ctctttggaggctgaatggggtcccccgactctggctttcccccaggtttacatgttcctggtgaaatggcagga

SEQ ID NO: 32951 - RNA, 76 nt, synthetic construct
  source 1..76: mol_type = other RNA
cctctttggaggctgaatggggtcccccgactctggctttcccccaggtttacatgttcctggtgaaatggcagga

SEQ ID NO: 32952 - RNA, 76 nt, synthetic construct
  source 1..76: mol_type = other RNA
cctctttggaggctgaatggggtcccccgactctggctttcccccaggtatacatgttcctggtgaaatggcagga

SEQ ID NO: 32953 - RNA, 76 nt, synthetic construct
  source 1..76: mol_type = other RNA
cctctttggaggctgaatggggtcccccgactctggctttcccccaggtgtacatgttcctggtgaaatggcagga

SEQ ID NO: 32954 - RNA, 76 nt, synthetic construct
  source 1..76: mol_type = other RNA
cctctttggaggctgaatggggtcccccgactctggctttcccccaggtctacatgttcctggtgaaatggcagga

SEQ ID NO: 32955 - RNA, 77 nt, synthetic construct
  source 1..77: mol_type = other RNA
gcctctttggaggctgaatggggtcccccgactctggctttcccccaggtatacatgttcctggtgaaatggcagga

SEQ ID NO: 32956 - RNA, 77 nt, synthetic construct
  source 1..77: mol_type = other RNA
gcctctttggaggctgaatggggtcccccgactctggctttcccccaggtttacatgttcctggtgaaatggcagga

SEQ ID NO: 32957 - RNA, 77 nt, synthetic construct
  source 1..77: mol_type = other RNA
gcctctttggaggctgaatggggtcccccgactctggctttcccccaggtctacatgttcctggtgaaatggcagga

SEQ ID NO: 32958 - RNA, 77 nt, synthetic construct
  source 1..77: mol_type = other RNA
gcctctttggaggctgaatggggtcccccgactctggctttcccccaggtgtacatgttcctggtgaaatggcagga

SEQ ID NO: 32959 - RNA, 78 nt, synthetic construct
  source 1..78: mol_type = other RNA
agcctctttggaggctgaatggggtcccccgactctggctttcccccaggtttacatgttcctggtgaaatggcagga

SEQ ID NO: 32960 - RNA, 78 nt, synthetic construct
  source 1..78: mol_type = other RNA
agcctctttggaggctgaatggggtcccccgactctggctttcccccaggtgtacatgttcctggtgaaatggcagga

SEQ ID NO: 32961 - RNA, 78 nt, synthetic construct
  source 1..78: mol_type = other RNA
agcctctttggaggctgaatggggtcccccgactctggctttcccccaggtctacatgttcctggtgaaatggcagga

SEQ ID NO: 32962 - RNA, 78 nt, synthetic construct
  source 1..78: mol_type = other RNA
agcctctttggaggctgaatggggtcccccgactctggctttcccccaggtatacatgttcctggtgaaatggcagga

SEQ ID NO: 32963 - RNA, 79 nt, synthetic construct
  source 1..79: mol_type = other RNA
aagcctctttggaggctgaatggggtcccccgactctggctttcccccaggtttacatgttcctggtgaaatggcagga

SEQ ID NO: 32964 - RNA, 79 nt, synthetic construct
  source 1..79: mol_type = other RNA
aagcctctttggaggctgaatggggtcccccgactctggctttcccccaggtgtacatgttcctggtgaaatggcagga

SEQ ID NO: 32965 - RNA, 79 nt, synthetic construct
  source 1..79: mol_type = other RNA
aagcctctttggaggctgaatggggtcccccgactctggctttcccccaggtatacatgttcctggtgaaatggcagga

SEQ ID NO: 32966 - RNA, 79 nt, synthetic construct
  source 1..79: mol_type = other RNA
aagcctctttggaggctgaatggggtcccccgactctggctttcccccaggtctacatgttcctggtgaaatggcagga

SEQ ID NO: 32967 - RNA, 80 nt, synthetic construct
  source 1..80: mol_type = other RNA
aaagcctctttggaggctgaatggggtcccccgactctggctttcccccaggtctacatgttcctggtgaaatggcagga

SEQ ID NO: 32968 - RNA, 80 nt, synthetic construct
  source 1..80: mol_type = other RNA
aaagcctctttggaggctgaatggggtcccccgactctggctttcccccaggtttacatgttcctggtgaaatggcagga

SEQ ID NO: 32969 - RNA, 80 nt, synthetic construct
  source 1..80: mol_type = other RNA
aaagcctctttggaggctgaatggggtcccccgactctggctttcccccaggtgtacatgttcctggtgaaatggcagga

SEQ ID NO: 32970 - RNA, 80 nt, synthetic construct
  source 1..80: mol_type = other RNA
aaagcctctttggaggctgaatggggtcccccgactctggctttcccccaggtatacatgttcctggtgaaatggcagga

SEQ ID NO: 32971 - RNA, 81 nt, synthetic construct
  source 1..81: mol_type = other RNA
caaagcctctttggaggctgaatggggtcccccgactctggctttcccccaggtgtacatgttcctggtgaaatggcagga

SEQ ID NO: 32972 - RNA, 81 nt, synthetic construct
  source 1..81: mol_type = other RNA
caaagcctctttggaggctgaatggggtcccccgactctggctttcccccaggtctacatgttcctggtgaaatggcagga

SEQ ID NO: 32973 - RNA, 81 nt, synthetic construct
  source 1..81: mol_type = other RNA
caaagcctctttggaggctgaatggggtcccccgactctggctttcccccaggtatacatgttcctggtgaaatggcagga

SEQ ID NO: 32974 - RNA, 81 nt, synthetic construct
  source 1..81: mol_type = other RNA
caaagcctctttggaggctgaatggggtcccccgactctggctttcccccaggtttacatgttcctggtgaaatggcagga

SEQ ID NO: 32975 - RNA, 82 nt, synthetic construct
  source 1..82: mol_type = other RNA
gcaaagcctctttggaggctgaatggggtcccccgactctggctttcccccaggtatacatgttcctggtgaaatggcagga

SEQ ID NO: 32976 - RNA, 82 nt, synthetic construct
  source 1..82: mol_type = other RNA
gcaaagcctctttggaggctgaatggggtcccccgactctggctttcccccaggtgtacatgttcctggtgaaatggcagga

SEQ ID NO: 32977 - RNA, 82 nt, synthetic construct
  source 1..82: mol_type = other RNA
gcaaagcctctttggaggctgaatggggtcccccgactctggctttcccccaggtttacatgttcctggtgaaatggcagga

SEQ ID NO: 32978 - RNA, 82 nt, synthetic construct
  source 1..82: mol_type = other RNA
gcaaagcctctttggaggctgaatggggtcccccgactctggctttcccccaggtctacatgttcctggtgaaatggcagga

SEQ ID NO: 32979 - RNA, 83 nt, synthetic construct
  source 1..83: mol_type = other RNA
agcaaagcctctttggaggctgaatggggtcccccgactctggctttcccccaggtatacatgttcctggtgaaatggcagga

SEQ ID NO: 32980 - RNA, 83 nt, synthetic construct
  source 1..83: mol_type = other RNA
agcaaagcctctttggaggctgaatggggtcccccgactctggctttcccccaggtctacatgttcctggtgaaatggcagga

SEQ ID NO: 32981 - RNA, 83 nt, synthetic construct
  source 1..83: mol_type = other RNA
agcaaagcctctttggaggctgaatggggtcccccgactctggctttcccccaggtttacatgttcctggtgaaatggcagga

SEQ ID NO: 32982 - RNA, 83 nt, synthetic construct
  source 1..83: mol_type = other RNA
agcaaagcctctttggaggctgaatggggtcccccgactctggctttcccccaggtgtacatgttcctggtgaaatggcagga

SEQ ID NO: 32983 - RNA, 84 nt, synthetic construct
  source 1..84: mol_type = other RNA
cagcaaagcctctttggaggctgaatggggtcccccgactctggctttcccccaggtatacatgttcctggtgaaatggcagga

SEQ ID NO: 32984 - RNA, 84 nt, synthetic construct
  source 1..84: mol_type = other RNA
cagcaaagcctctttggaggctgaatggggtcccccgactctggctttcccccaggtctacatgttcctggtgaaatggcagga

SEQ ID NO: 32985 - RNA, 84 nt, synthetic construct
  source 1..84: mol_type = other RNA
cagcaaagcctctttggaggctgaatggggtcccccgactctggctttcccccaggtttacatgttcctggtgaaatggcagga

SEQ ID NO: 32986 - RNA, 84 nt, synthetic construct
  source 1..84: mol_type = other RNA
cagcaaagcctctttggaggctgaatggggtcccccgactctggctttcccccaggtgtacatgttcctggtgaaatggcagga

SEQ ID NO: 32987 - RNA, 85 nt, synthetic construct
  source 1..85: mol_type = other RNA
acagcaaagcctctttggaggctgaatggggtcccccgactctggctttcccccaggtttacatgttcctggtgaaatggcagga

SEQ ID NO: 32988 - RNA, 85 nt, synthetic construct
  source 1..85: mol_type = other RNA
acagcaaagcctctttggaggctgaatggggtcccccgactctggctttcccccaggtgtacatgttcctggtgaaatggcagga

SEQ ID NO: 32989 - RNA, 85 nt, synthetic construct
  source 1..85: mol_type = other RNA
acagcaaagcctctttggaggctgaatggggtcccccgactctggctttcccccaggtatacatgttcctggtgaaatggcagga

SEQ ID NO: 32990 - RNA, 85 nt, synthetic construct
  source 1..85: mol_type = other RNA
acagcaaagcctctttggaggctgaatggggtcccccgactctggctttcccccaggtctacatgttcctggtgaaatggcagga

SEQ ID NO: 32991 - RNA, 86 nt, synthetic construct
  source 1..86: mol_type = other RNA
cacagcaaagcctctttggaggctgaatggggtcccccgactctggctttcccccaggtatacatgttcctggtgaaatggcagga

SEQ ID NO: 32992 - RNA, 86 nt, synthetic construct
  source 1..86: mol_type = other RNA
cacagcaaagcctctttggaggctgaatggggtcccccgactctggctttcccccaggtctacatgttcctggtgaaatggcagga

SEQ ID NO: 32993 - RNA, 86 nt, synthetic construct
  source 1..86: mol_type = other RNA
cacagcaaagcctctttggaggctgaatggggtcccccgactctggctttcccccaggtttacatgttcctggtgaaatggcagga

SEQ ID NO: 32994 - RNA, 86 nt, synthetic construct
  source 1..86: mol_type = other RNA
cacagcaaagcctctttggaggctgaatggggtcccccgactctggctttcccccaggtgtacatgttcctggtgaaatggcagga

SEQ ID NO: 32995 - RNA, 87 nt, synthetic construct
  source 1..87: mol_type = other RNA
acacagcaaagcctctttggaggctgaatggggtcccccgactctggctttcccccaggtttacatgttcctggtgaaatggcagga

SEQ ID NO: 32996 - RNA, 87 nt, synthetic construct
  source 1..87: mol_type = other RNA
acacagcaaagcctctttggaggctgaatggggtcccccgactctggctttcccccaggtctacatgttcctggtgaaatggcagga

SEQ ID NO: 32997 - RNA, 87 nt, synthetic construct
  source 1..87: mol_type = other RNA
acacagcaaagcctctttggaggctgaatggggtcccccgactctggctttcccccaggtatacatgttcctggtgaaatggcagga

SEQ ID NO: 32998 - RNA, 87 nt, synthetic construct
  source 1..87: mol_type = other RNA
acacagcaaagcctctttggaggctgaatggggtcccccgactctggctttcccccaggtgtacatgttcctggtgaaatggcagga

SEQ ID NO: 32999 - RNA, 88 nt, synthetic construct
  source 1..88: mol_type = other RNA
cacacagcaaagcctctttggaggctgaatggggtcccccgactctggctttcccccaggtgtacatgttcctggtgaaatggcagga

SEQ ID NO: 33000 - RNA, 88 nt, synthetic construct
  source 1..88: mol_type = other RNA
cacacagcaaagcctctttggaggctgaatggggtcccccgactctggctttcccccaggtttacatgttcctggtgaaatggcagga

SEQ ID NO: 33001 - RNA, 88 nt, synthetic construct
  source 1..88: mol_type = other RNA
cacacagcaaagcctctttggaggctgaatggggtcccccgactctggctttcccccaggtctacatgttcctggtgaaatggcagga

SEQ ID NO: 33002 - RNA, 88 nt, synthetic construct
  source 1..88: mol_type = other RNA
cacacagcaaagcctctttggaggctgaatggggtcccccgactctggctttcccccaggtatacatgttcctggtgaaatggcagga

SEQ ID NO: 33003 - RNA, 89 nt, synthetic construct
  source 1..89: mol_type = other RNA
gcacacagcaaagcctctttggaggctgaatggggtcccccgactctggctttcccccaggtctacatgttcctggtgaaatggcagga

SEQ ID NO: 33004 - RNA, 89 nt, synthetic construct
  source 1..89: mol_type = other RNA
gcacacagcaaagcctctttggaggctgaatggggtcccccgactctggctttcccccaggtttacatgttcctggtgaaatggcagga

SEQ ID NO: 33005 - RNA, 89 nt, synthetic construct
  source 1..89: mol_type = other RNA
gcacacagcaaagcctctttggaggctgaatggggtcccccgactctggctttcccccaggtgtacatgttcctggtgaaatggcagga

SEQ ID NO: 33006 - RNA, 89 nt, synthetic construct
  source 1..89: mol_type = other RNA
gcacacagcaaagcctctttggaggctgaatggggtcccccgactctggctttcccccaggtatacatgttcctggtgaaatggcagga

SEQ ID NO: 33007 - RNA, 90 nt, synthetic construct
  source 1..90: mol_type = other RNA
tgcacacagcaaagcctctttggaggctgaatggggtcccccgactctggctttcccccaggtgtacatgttcctggtgaaatggcagga

SEQ ID NO: 33008 - RNA, 90 nt, synthetic construct
  source 1..90: mol_type = other RNA
tgcacacagcaaagcctctttggaggctgaatggggtcccccgactctggctttcccccaggtttacatgttcctggtgaaatggcagga

SEQ ID NO: 33009 - RNA, 90 nt, synthetic construct
  source 1..90: mol_type = other RNA
tgcacacagcaaagcctctttggaggctgaatggggtcccccgactctggctttcccccaggtctacatgttcctggtgaaatggcagga

SEQ ID NO: 33010 - RNA, 90 nt, synthetic construct
  source 1..90: mol_type = other RNA
tgcacacagcaaagcctctttggaggctgaatggggtcccccgactctggctttcccccaggtatacatgttcctggtgaaatggcagga

SEQ ID NO: 33011 - RNA, 91 nt, synthetic construct
  source 1..91: mol_type = other RNA
gtgcacacagcaaagcctctttggaggctgaatggggtcccccgactctggctttcccccaggtgtacatgttcctggtgaaatggcagga

SEQ ID NO: 33012 - RNA, 91 nt, synthetic construct
  source 1..91: mol_type = other RNA
gtgcacacagcaaagcctctttggaggctgaatggggtcccccgactctggctttcccccaggtatacatgttcctggtgaaatggcagga

SEQ ID NO: 33013 - RNA, 91 nt, synthetic construct
  source 1..91: mol_type = other RNA
gtgcacacagcaaagcctctttggaggctgaatggggtcccccgactctggctttcccccaggtttacatgttcctggtgaaatggcagga

SEQ ID NO: 33014 - RNA, 91 nt, synthetic construct
  source 1..91: mol_type = other RNA
gtgcacacagcaaagcctctttggaggctgaatggggtcccccgactctggctttcccccaggtctacatgttcctggtgaaatggcagga

SEQ ID NO: 33015 - RNA, 92 nt, synthetic construct
  source 1..92: mol_type = other RNA
ggtgcacacagcaaagcctctttggaggctgaatggggtcccccgactctggctttcccccaggtttacatgttcctggtgaaatggcagga

SEQ ID NO: 33016 - RNA, 92 nt, synthetic construct
  source 1..92: mol_type = other RNA
ggtgcacacagcaaagcctctttggaggctgaatggggtcccccgactctggctttcccccaggtatacatgttcctggtgaaatggcagga

SEQ ID NO: 33017 - RNA, 92 nt, synthetic construct
  source 1..92: mol_type = other RNA
ggtgcacacagcaaagcctctttggaggctgaatggggtcccccgactctggctttcccccaggtctacatgttcctggtgaaatggcagga

SEQ ID NO: 33018 - RNA, 92 nt, synthetic construct
  source 1..92: mol_type = other RNA
ggtgcacacagcaaagcctctttggaggctgaatggggtcccccgactctggctttcccccaggtgtacatgttcctggtgaaatggcagga

SEQ ID NO: 33019 - RNA, 93 nt, synthetic construct
  source 1..93: mol_type = other RNA
gggtgcacacagcaaagcctctttggaggctgaatggggtcccccgactctggctttcccccaggtctacatgttcctggtgaaatggcagga

SEQ ID NO: 33020 - RNA, 93 nt, synthetic construct
  source 1..93: mol_type = other RNA
gggtgcacacagcaaagcctctttggaggctgaatggggtcccccgactctggctttcccccaggtatacatgttcctggtgaaatggcagga

SEQ ID NO: 33021 - RNA, 93 nt, synthetic construct
  source 1..93: mol_type = other RNA
gggtgcacacagcaaagcctctttggaggctgaatggggtcccccgactctggctttcccccaggtttacatgttcctggtgaaatggcagga

SEQ ID NO: 33022 - RNA, 93 nt, synthetic construct
  source 1..93: mol_type = other RNA
gggtgcacacagcaaagcctctttggaggctgaatggggtcccccgactctggctttcccccaggtgtacatgttcctggtgaaatggcagga

SEQ ID NO: 33023 - RNA, 94 nt, synthetic construct
  source 1..94: mol_type = other RNA
tgggtgcacacagcaaagcctctttggaggctgaatggggtcccccgactctggctttcccccaggtttacatgttcctggtgaaatggcagga

SEQ ID NO: 33024 - RNA, 94 nt, synthetic construct
  source 1..94: mol_type = other RNA
tgggtgcacacagcaaagcctctttggaggctgaatggggtcccccgactctggctttcccccaggtgtacatgttcctggtgaaatggcagga

SEQ ID NO: 33025 - RNA, 94 nt, synthetic construct
  source 1..94: mol_type = other RNA
tgggtgcacacagcaaagcctctttggaggctgaatggggtcccccgactctggctttcccccaggtctacatgttcctggtgaaatggcagga

SEQ ID NO: 33026 - RNA, 94 nt, synthetic construct
  source 1..94: mol_type = other RNA
tgggtgcacacagcaaagcctctttggaggctgaatggggtcccccgactctggctttcccccaggtatacatgttcctggtgaaatggcagga

SEQ ID NO: 33027 - RNA, 95 nt, synthetic construct
  source 1..95: mol_type = other RNA
ctgggtgcacacagcaaagcctctttggaggctgaatggggtcccccgactctggctttcccccaggtttacatgttcctggtgaaatggcagga

SEQ ID NO: 33028 - RNA, 95 nt, synthetic construct
  source 1..95: mol_type = other RNA
ctgggtgcacacagcaaagcctctttggaggctgaatggggtcccccgactctggctttcccccaggtctacatgttcctggtgaaatggcagga

SEQ ID NO: 33029 - RNA, 95 nt, synthetic construct
  source 1..95: mol_type = other RNA
ctgggtgcacacagcaaagcctctttggaggctgaatggggtcccccgactctggctttcccccaggtatacatgttcctggtgaaatggcagga

SEQ ID NO: 33030 - RNA, 95 nt, synthetic construct
  source 1..95: mol_type = other RNA
ctgggtgcacacagcaaagcctctttggaggctgaatggggtcccccgactctggctttcccccaggtgtacatgttcctggtgaaatggcagga

SEQ ID NO: 33031 - RNA, 96 nt, synthetic construct
  source 1..96: mol_type = other RNA
cctgggtgcacacagcaaagcctctttggaggctgaatggggtcccccgactctggctttcccccaggtctacatgttcctggtgaaatggcagga

SEQ ID NO: 33032 - RNA, 96 nt, synthetic construct
  source 1..96: mol_type = other RNA
cctgggtgcacacagcaaagcctctttggaggctgaatggggtcccccgactctggctttcccccaggtgtacatgttcctggtgaaatggcagga

SEQ ID NO: 33033 - RNA, 96 nt, synthetic construct
  source 1..96: mol_type = other RNA
cctgggtgcacacagcaaagcctctttggaggctgaatggggtcccccgactctggctttcccccaggtttacatgttcctggtgaaatggcagga

SEQ ID NO: 33034 - RNA, 96 nt, synthetic construct
  source 1..96: mol_type = other RNA
cctgggtgcacacagcaaagcctctttggaggctgaatggggtcccccgactctggctttcccccaggtatacatgttcctggtgaaatggcagga

SEQ ID NO: 33035 - RNA, 97 nt, synthetic construct
  source 1..97: mol_type = other RNA
tcctgggtgcacacagcaaagcctctttggaggctgaatggggtcccccgactctggctttcccccaggtctacatgttcctggtgaaatggcagga

SEQ ID NO: 33036 - RNA, 97 nt, synthetic construct
  source 1..97: mol_type = other RNA
tcctgggtgcacacagcaaagcctctttggaggctgaatggggtcccccgactctggctttcccccaggtgtacatgttcctggtgaaatggcagga

SEQ ID NO: 33037 - RNA, 97 nt, synthetic construct
  source 1..97: mol_type = other RNA
tcctgggtgcacacagcaaagcctctttggaggctgaatggggtcccccgactctggctttcccccaggtttacatgttcctggtgaaatggcagga

SEQ ID NO: 33038 - RNA, 97 nt, synthetic construct
  source 1..97: mol_type = other RNA
tcctgggtgcacacagcaaagcctctttggaggctgaatggggtcccccgactctggctttcccccaggtatacatgttcctggtgaaatggcagga

SEQ ID NO: 33039 - RNA, 98 nt, synthetic construct
  source 1..98: mol_type = other RNA
atcctgggtgcacacagcaaagcctctttggaggctgaatggggtcccccgactctggctttcccccaggtgtacatgttcctggtgaaatggcagga

SEQ ID NO: 33040 - RNA, 98 nt, synthetic construct
  source 1..98: mol_type = other RNA
atcctgggtgcacacagcaaagcctctttggaggctgaatggggtcccccgactctggctttcccccaggtatacatgttcctggtgaaatggcagga

SEQ ID NO: 33041 - RNA, 98 nt, synthetic construct
  source 1..98: mol_type = other RNA
atcctgggtgcacacagcaaagcctctttggaggctgaatggggtcccccgactctggctttcccccaggtctacatgttcctggtgaaatggcagga

SEQ ID NO: 33042 - RNA, 98 nt, synthetic construct
  source 1..98: mol_type = other RNA
atcctgggtgcacacagcaaagcctctttggaggctgaatggggtcccccgactctggctttcccccaggtttacatgttcctggtgaaatggcagga

SEQ ID NO: 33043 - RNA, 99 nt, synthetic construct
  source 1..99: mol_type = other RNA
gatcctgggtgcacacagcaaagcctctttggaggctgaatggggtcccccgactctggctttcccccaggtgtacatgttcctggtgaaatggcagga

SEQ ID NO: 33044 - RNA, 99 nt, synthetic construct
  source 1..99: mol_type = other RNA
gatcctgggtgcacacagcaaagcctctttggaggctgaatggggtcccccgactctggctttcccccaggtctacatgttcctggtgaaatggcagga

SEQ ID NO: 33045 - RNA, 99 nt, synthetic construct
  source 1..99: mol_type = other RNA
gatcctgggtgcacacagcaaagcctctttggaggctgaatggggtcccccgactctggctttcccccaggtatacatgttcctggtgaaatggcagga

SEQ ID NO: 33046 - RNA, 99 nt, synthetic construct
  source 1..99: mol_type = other RNA
gatcctgggtgcacacagcaaagcctctttggaggctgaatggggtcccccgactctggctttcccccaggtttacatgttcctggtgaaatggcagga

SEQ ID NO: 33047 - RNA, 100 nt, synthetic construct
  source 1..100: mol_type = other RNA
ggatcctgggtgcacacagcaaagcctctttggaggctgaatggggtcccccgactctggctttcccccaggtgtacatgttcctggtgaaatggcagga

SEQ ID NO: 33048 - RNA, 100 nt, synthetic construct
  source 1..100: mol_type = other RNA
ggatcctgggtgcacacagcaaagcctctttggaggctgaatggggtcccccgactctggctttcccccaggtctacatgttcctggtgaaatggcagga

SEQ ID NO: 33049 - RNA, 100 nt, synthetic construct
  source 1..100: mol_type = other RNA
ggatcctgggtgcacacagcaaagcctctttggaggctgaatggggtcccccgactctggctttcccccaggtatacatgttcctggtgaaatggcagga

SEQ ID NO: 33050 - RNA, 100 nt, synthetic construct
  source 1..100: mol_type = other RNA
ggatcctgggtgcacacagcaaagcctctttggaggctgaatggggtcccccgactctggctttcccccaggtttacatgttcctggtgaaatggcagga

SEQ ID NO: 33051 - RNA, 101 nt, synthetic construct
  source 1..101: mol_type = other RNA
gggatcctgggtgcacacagcaaagcctctttggaggctgaatggggtcccccgactctggctttcccccaggtctacatgttcctggtgaaatggcagga

SEQ ID NO: 33052 - RNA, 101 nt, synthetic construct
  source 1..101: mol_type = other RNA
gggatcctgggtgcacacagcaaagcctctttggaggctgaatggggtcccccgactctggctttcccccaggtatacatgttcctggtgaaatggcagga

SEQ ID NO: 33053 - RNA, 101 nt, synthetic construct
  source 1..101: mol_type = other RNA
gggatcctgggtgcacacagcaaagcctctttggaggctgaatggggtcccccgactctggctttcccccaggtgtacatgttcctggtgaaatggcagga

SEQ ID NO: 33054 - RNA, 101 nt, synthetic construct
  source 1..101: mol_type = other RNA
gggatcctgggtgcacacagcaaagcctctttggaggctgaatggggtcccccgactctggctttcccccaggtttacatgttcctggtgaaatggcagga

SEQ ID NO: 33055 - RNA, 102 nt, synthetic construct
  source 1..102: mol_type = other RNA
tgggatcctgggtgcacacagcaaagcctctttggaggctgaatggggtcccccgactctggctttcccccaggtgtacatgttcctggtgaaatggcagga

SEQ ID NO: 33056 - RNA, 102 nt, synthetic construct
  source 1..102: mol_type = other RNA
tgggatcctgggtgcacacagcaaagcctctttggaggctgaatggggtcccccgactctggctttcccccaggtctacatgttcctggtgaaatggcagga

SEQ ID NO: 33057 - RNA, 102 nt, synthetic construct
  source 1..102: mol_type = other RNA
tgggatcctgggtgcacacagcaaagcctctttggaggctgaatggggtcccccgactctggctttcccccaggtatacatgttcctggtgaaatggcagga

SEQ ID NO: 33058 - RNA, 102 nt, synthetic construct
  source 1..102: mol_type = other RNA
tgggatcctgggtgcacacagcaaagcctctttggaggctgaatggggtcccccgactctggctttcccccaggtttacatgttcctggtgaaatggcagga

SEQ ID NO: 33059 - RNA, 103 nt, synthetic construct
  source 1..103: mol_type = other RNA
gtgggatcctgggtgcacacagcaaagcctctttggaggctgaatggggtcccccgactctggctttcccccaggtgtacatgttcctggtgaaatggcagga

SEQ ID NO: 33060 - RNA, 103 nt, synthetic construct
  source 1..103: mol_type = other RNA
gtgggatcctgggtgcacacagcaaagcctctttggaggctgaatggggtcccccgactctggctttcccccaggtctacatgttcctggtgaaatggcagga

SEQ ID NO: 33061 - RNA, 103 nt, synthetic construct
  source 1..103: mol_type = other RNA
gtgggatcctgggtgcacacagcaaagcctctttggaggctgaatggggtcccccgactctggctttcccccaggtatacatgttcctggtgaaatggcagga

SEQ ID NO: 33062 - RNA, 103 nt, synthetic construct
  source 1..103: mol_type = other RNA
gtgggatcctgggtgcacacagcaaagcctctttggaggctgaatggggtcccccgactctggctttcccccaggtttacatgttcctggtgaaatggcagga

SEQ ID NO: 33063 - RNA, 16 nt, synthetic construct
  source 1..16: mol_type = other RNA
ggaactcgtagatctc

SEQ ID NO: 33064 - RNA, 17 nt, synthetic construct
  source 1..17: mol_type = other RNA
tggaactcgtagatctc

SEQ ID NO: 33065 - RNA, 18 nt, synthetic construct
  source 1..18: mol_type = other RNA
atggaactcgtagatctc

SEQ ID NO: 33066 - RNA, 19 nt, synthetic construct
  source 1..19: mol_type = other RNA
catggaactcgtagatctc

SEQ ID NO: 33067 - RNA, 20 nt, synthetic construct
  source 1..20: mol_type = other RNA
acatggaactcgtagatctc

SEQ ID NO: 33068 - RNA, 21 nt, synthetic construct
  source 1..21: mol_type = other RNA
cacatggaactcgtagatctc

SEQ ID NO: 33069 - RNA, 22 nt, synthetic construct
  source 1..22: mol_type = other RNA
tcacatggaactcgtagatctc

SEQ ID NO: 33070-33075 - skipped (6 entries)

SEQ ID NO: 33076 - RNA, 10 nt, synthetic construct
  source 1..10: mol_type = other RNA
atctacgagt

SEQ ID NO: 33077 - RNA, 11 nt, synthetic construct
  source 1..11: mol_type = other RNA
atctacgagtt

SEQ ID NO: 33078 - RNA, 12 nt, synthetic construct
  source 1..12: mol_type = other RNA
atctacgagttc

SEQ ID NO: 33079 - RNA, 13 nt, synthetic construct
  source 1..13: mol_type = other RNA
atctacgagttcc

SEQ ID NO: 33080 - RNA, 14 nt, synthetic construct
  source 1..14: mol_type = other RNA
atctacgagttcca

SEQ ID NO: 33081 - RNA, 15 nt, synthetic construct
  source 1..15: mol_type = other RNA
atctacgagttccat

SEQ ID NO: 33082 - RNA, 16 nt, synthetic construct
  source 1..16: mol_type = other RNA
atctacgagttccatg

SEQ ID NO: 33083 - RNA, 17 nt, synthetic construct
  source 1..17: mol_type = other RNA
atctacgagttccatgt

SEQ ID NO: 33084 - RNA, 18 nt, synthetic construct
  source 1..18: mol_type = other RNA
atctacgagttccatgtg

SEQ ID NO: 33085 - RNA, 19 nt, synthetic construct
  source 1..19: mol_type = other RNA
atctacgagttccatgtga

SEQ ID NO: 33086 - RNA, 66 nt, synthetic construct
  source 1..66: mol_type = other RNA
gtctacatgttcctggtgaaatggcaggacctgtcggagaaggtggtctaccggcgcttcaccgag

SEQ ID NO: 33087 - RNA, 66 nt, synthetic construct
  source 1..66: mol_type = other RNA
gtgtacatgttcctggtgaaatggcaggacctgtcggagaaggtggtctaccggcgcttcaccgag

SEQ ID NO: 33088 - RNA, 66 nt, synthetic construct
  source 1..66: mol_type = other RNA
gtttacatgttcctggtgaaatggcaggacctgtcggagaaggtggtctaccggcgcttcaccgag

SEQ ID NO: 33089 - RNA, 66 nt, synthetic construct
  source 1..66: mol_type = other RNA
gtatacatgttcctggtgaaatggcaggacctgtcggagaaggtggtctaccggcgcttcaccgag

SEQ ID NO: 33090 - RNA, 67 nt, synthetic construct
  source 1..67: mol_type = other RNA
ggtgtacatgttcctggtgaaatggcaggacctgtcggagaaggtggtctaccggcgcttcaccgag

SEQ ID NO: 33091 - RNA, 67 nt, synthetic construct
  source 1..67: mol_type = other RNA
ggtatacatgttcctggtgaaatggcaggacctgtcggagaaggtggtctaccggcgcttcaccgag

SEQ ID NO: 33092 - RNA, 67 nt, synthetic construct
  source 1..67: mol_type = other RNA
ggtctacatgttcctggtgaaatggcaggacctgtcggagaaggtggtctaccggcgcttcaccgag

SEQ ID NO: 33093 - RNA, 67 nt, synthetic construct
  source 1..67: mol_type = other RNA
ggtttacatgttcctggtgaaatggcaggacctgtcggagaaggtggtctaccggcgcttcaccgag

SEQ ID NO: 33094 - RNA, 68 nt, synthetic construct
  source 1..68: mol_type = other RNA
aggtgtacatgttcctggtgaaatggcaggacctgtcggagaaggtggtctaccggcgcttcaccgag

SEQ ID NO: 33095 - RNA, 68 nt, synthetic construct
  source 1..68: mol_type = other RNA
aggtatacatgttcctggtgaaatggcaggacctgtcggagaaggtggtctaccggcgcttcaccgag

SEQ ID NO: 33096 - RNA, 68 nt, synthetic construct
  source 1..68: mol_type = other RNA
aggtctacatgttcctggtgaaatggcaggacctgtcggagaaggtggtctaccggcgcttcaccgag

SEQ ID NO: 33097 - RNA, 68 nt, synthetic construct
  source 1..68: mol_type = other RNA
aggtttacatgttcctggtgaaatggcaggacctgtcggagaaggtggtctaccggcgcttcaccgag

SEQ ID NO: 33098 - RNA, 69 nt, synthetic construct
  source 1..69: mol_type = other RNA
caggtctacatgttcctggtgaaatggcaggacctgtcggagaaggtggtctaccggcgcttcaccgag

SEQ ID NO: 33099 - RNA, 69 nt, synthetic construct
  source 1..69: mol_type = other RNA
caggtttacatgttcctggtgaaatggcaggacctgtcggagaaggtggtctaccggcgcttcaccgag

SEQ ID NO: 33100 - RNA, 69 nt, synthetic construct
  source 1..69: mol_type = other RNA
caggtatacatgttcctggtgaaatggcaggacctgtcggagaaggtggtctaccggcgcttcaccgag

SEQ ID NO: 33101 - RNA, 69 nt, synthetic construct
  source 1..69: mol_type = other RNA
caggtgtacatgttcctggtgaaatggcaggacctgtcggagaaggtggtctaccggcgcttcaccgag

SEQ ID NO: 33102 - RNA, 70 nt, synthetic construct
  source 1..70: mol_type = other RNA
ccaggtatacatgttcctggtgaaatggcaggacctgtcggagaaggtggtctaccggcgcttcaccgag

SEQ ID NO: 33103 - RNA, 70 nt, synthetic construct
  source 1..70: mol_type = other RNA
ccaggtctacatgttcctggtgaaatggcaggacctgtcggagaaggtggtctaccggcgcttcaccgag

SEQ ID NO: 33104 - RNA, 70 nt, synthetic construct
  source 1..70: mol_type = other RNA
ccaggtgtacatgttcctggtgaaatggcaggacctgtcggagaaggtggtctaccggcgcttcaccgag

SEQ ID NO: 33105 - RNA, 70 nt, synthetic construct
  source 1..70: mol_type = other RNA
ccaggtttacatgttcctggtgaaatggcaggacctgtcggagaaggtggtctaccggcgcttcaccgag

SEQ ID NO: 33106 - RNA, 71 nt, synthetic construct
  source 1..71: mol_type = other RNA
cccaggtctacatgttcctggtgaaatggcaggacctgtcggagaaggtggtctaccggcgcttcaccgag

SEQ ID NO: 33107 - RNA, 71 nt, synthetic construct
  source 1..71: mol_type = other RNA
cccaggtatacatgttcctggtgaaatggcaggacctgtcggagaaggtggtctaccggcgcttcaccgag

SEQ ID NO: 33108 - RNA, 71 nt, synthetic construct
  source 1..71: mol_type = other RNA
cccaggtttacatgttcctggtgaaatggcaggacctgtcggagaaggtggtctaccggcgcttcaccgag

SEQ ID NO: 33109 - RNA, 71 nt, synthetic construct
  source 1..71: mol_type = other RNA
cccaggtgtacatgttcctggtgaaatggcaggacctgtcggagaaggtggtctaccggcgcttcaccgag

SEQ ID NO: 33110 - RNA, 72 nt, synthetic construct
  source 1..72: mol_type = other RNA
ccccaggtatacatgttcctggtgaaatggcaggacctgtcggagaaggtggtctaccggcgcttcaccgag

SEQ ID NO: 33111 - RNA, 72 nt, synthetic construct
  source 1..72: mol_type = other RNA
ccccaggtctacatgttcctggtgaaatggcaggacctgtcggagaaggtggtctaccggcgcttcaccgag

SEQ ID NO: 33112 - RNA, 72 nt, synthetic construct
  source 1..72: mol_type = other RNA
ccccaggtgtacatgttcctggtgaaatggcaggacctgtcggagaaggtggtctaccggcgcttcaccgag

SEQ ID NO: 33113 - RNA, 72 nt, synthetic construct
  source 1..72: mol_type = other RNA
ccccaggtttacatgttcctggtgaaatggcaggacctgtcggagaaggtggtctaccggcgcttcaccgag

SEQ ID NO: 33114 - RNA, 73 nt, synthetic construct
  source 1..73: mol_type = other RNA
cccccaggtctacatgttcctggtgaaatggcaggacctgtcggagaaggtggtctaccggcgcttcaccgag

SEQ ID NO: 33115 - RNA, 73 nt, synthetic construct
  source 1..73: mol_type = other RNA
cccccaggtgtacatgttcctggtgaaatggcaggacctgtcggagaaggtggtctaccggcgcttcaccgag

SEQ ID NO: 33116 - RNA, 73 nt, synthetic construct
  source 1..73: mol_type = other RNA
cccccaggtttacatgttcctggtgaaatggcaggacctgtcggagaaggtggtctaccggcgcttcaccgag

SEQ ID NO: 33117 - RNA, 73 nt, synthetic construct
  source 1..73: mol_type = other RNA
cccccaggtatacatgttcctggtgaaatggcaggacctgtcggagaaggtggtctaccggcgcttcaccgag

SEQ ID NO: 33118 - RNA, 74 nt, synthetic construct
  source 1..74: mol_type = other RNA
tcccccaggtttacatgttcctggtgaaatggcaggacctgtcggagaaggtggtctaccggcgcttcaccgag

SEQ ID NO: 33119 - RNA, 74 nt, synthetic construct
  source 1..74: mol_type = other RNA
tcccccaggtatacatgttcctggtgaaatggcaggacctgtcggagaaggtggtctaccggcgcttcaccgag

SEQ ID NO: 33120 - RNA, 74 nt, synthetic construct
  source 1..74: mol_type = other RNA
tcccccaggtgtacatgttcctggtgaaatggcaggacctgtcggagaaggtggtctaccggcgcttcaccgag

SEQ ID NO: 33121 - RNA, 74 nt, synthetic construct
  source 1..74: mol_type = other RNA
tcccccaggtctacatgttcctggtgaaatggcaggacctgtcggagaaggtggtctaccggcgcttcaccgag

SEQ ID NO: 33122 - RNA, 75 nt, synthetic construct
  source 1..75: mol_type = other RNA
ttcccccaggtatacatgttcctggtgaaatggcaggacctgtcggagaaggtggtctaccggcgcttcaccgag

SEQ ID NO: 33123 - RNA, 75 nt, synthetic construct
  source 1..75: mol_type = other RNA
ttcccccaggtttacatgttcctggtgaaatggcaggacctgtcggagaaggtggtctaccggcgcttcaccgag

SEQ ID NO: 33124 - RNA, 75 nt, synthetic construct
  source 1..75: mol_type = other RNA
ttcccccaggtctacatgttcctggtgaaatggcaggacctgtcggagaaggtggtctaccggcgcttcaccgag

SEQ ID NO: 33125 - RNA, 75 nt, synthetic construct
  source 1..75: mol_type = other RNA
ttcccccaggtgtacatgttcctggtgaaatggcaggacctgtcggagaaggtggtctaccggcgcttcaccgag

SEQ ID NO: 33126 - RNA, 76 nt, synthetic construct
  source 1..76: mol_type = other RNA
tttcccccaggtctacatgttcctggtgaaatggcaggacctgtcggagaaggtggtctaccggcgcttcaccgag

SEQ ID NO: 33127 - RNA, 76 nt, synthetic construct
  source 1..76: mol_type = other RNA
tttcccccaggtttacatgttcctggtgaaatggcaggacctgtcggagaaggtggtctaccggcgcttcaccgag

SEQ ID NO: 33128 - RNA, 76 nt, synthetic construct
  source 1..76: mol_type = other RNA
tttcccccaggtgtacatgttcctggtgaaatggcaggacctgtcggagaaggtggtctaccggcgcttcaccgag

SEQ ID NO: 33129 - RNA, 76 nt, synthetic construct
  source 1..76: mol_type = other RNA
tttcccccaggtatacatgttcctggtgaaatggcaggacctgtcggagaaggtggtctaccggcgcttcaccgag

SEQ ID NO: 33130 - RNA, 77 nt, synthetic construct
  source 1..77: mol_type = other RNA
ctttcccccaggtgtacatgttcctggtgaaatggcaggacctgtcggagaaggtggtctaccggcgcttcaccgag

SEQ ID NO: 33131 - RNA, 77 nt, synthetic construct
  source 1..77: mol_type = other RNA
ctttcccccaggtttacatgttcctggtgaaatggcaggacctgtcggagaaggtggtctaccggcgcttcaccgag

SEQ ID NO: 33132 - RNA, 77 nt, synthetic construct
  source 1..77: mol_type = other RNA
ctttcccccaggtatacatgttcctggtgaaatggcaggacctgtcggagaaggtggtctaccggcgcttcaccgag

SEQ ID NO: 33133 - RNA, 77 nt, synthetic construct
  source 1..77: mol_type = other RNA
ctttcccccaggtctacatgttcctggtgaaatggcaggacctgtcggagaaggtggtctaccggcgcttcaccgag

SEQ ID NO: 33134 - RNA, 78 nt, synthetic construct
  source 1..78: mol_type = other RNA
gctttcccccaggtttacatgttcctggtgaaatggcaggacctgtcggagaaggtggtctaccggcgcttcaccgag

SEQ ID NO: 33135 - RNA, 78 nt, synthetic construct
  source 1..78: mol_type = other RNA
gctttcccccaggtctacatgttcctggtgaaatggcaggacctgtcggagaaggtggtctaccggcgcttcaccgag

SEQ ID NO: 33136 - RNA, 78 nt, synthetic construct
  source 1..78: mol_type = other RNA
gctttcccccaggtgtacatgttcctggtgaaatggcaggacctgtcggagaaggtggtctaccggcgcttcaccgag

SEQ ID NO: 33137 - RNA, 78 nt, synthetic construct
  source 1..78: mol_type = other RNA
gctttcccccaggtatacatgttcctggtgaaatggcaggacctgtcggagaaggtggtctaccggcgcttcaccgag

SEQ ID NO: 33138 - RNA, 79 nt, synthetic construct
  source 1..79: mol_type = other RNA
ggctttcccccaggtatacatgttcctggtgaaatggcaggacctgtcggagaaggtggtctaccggcgcttcaccgag

SEQ ID NO: 33139 - RNA, 79 nt, synthetic construct
  source 1..79: mol_type = other RNA
ggctttcccccaggtctacatgttcctggtgaaatggcaggacctgtcggagaaggtggtctaccggcgcttcaccgag

SEQ ID NO: 33140 - RNA, 79 nt, synthetic construct
  source 1..79: mol_type = other RNA
ggctttcccccaggtgtacatgttcctggtgaaatggcaggacctgtcggagaaggtggtctaccggcgcttcaccgag

SEQ ID NO: 33141 - RNA, 79 nt, synthetic construct
  source 1..79: mol_type = other RNA
ggctttcccccaggtttacatgttcctggtgaaatggcaggacctgtcggagaaggtggtctaccggcgcttcaccgag

SEQ ID NO: 33142 - RNA, 80 nt, synthetic construct
  source 1..80: mol_type = other RNA
tggctttcccccaggtatacatgttcctggtgaaatggcaggacctgtcggagaaggtggtctaccggcgcttcaccgag

SEQ ID NO: 33143 - RNA, 80 nt, synthetic construct
  source 1..80: mol_type = other RNA
tggctttcccccaggtgtacatgttcctggtgaaatggcaggacctgtcggagaaggtggtctaccggcgcttcaccgag

SEQ ID NO: 33144 - RNA, 80 nt, synthetic construct
  source 1..80: mol_type = other RNA
tggctttcccccaggtttacatgttcctggtgaaatggcaggacctgtcggagaaggtggtctaccggcgcttcaccgag

SEQ ID NO: 33145 - RNA, 80 nt, synthetic construct
  source 1..80: mol_type = other RNA
tggctttcccccaggtctacatgttcctggtgaaatggcaggacctgtcggagaaggtggtctaccggcgcttcaccgag

SEQ ID NO: 33146 - RNA, 81 nt, synthetic construct
  source 1..81: mol_type = other RNA
ctggctttcccccaggtgtacatgttcctggtgaaatggcaggacctgtcggagaaggtggtctaccggcgcttcaccgag

SEQ ID NO: 33147 - RNA, 81 nt, synthetic construct
  source 1..81: mol_type = other RNA
ctggctttcccccaggtttacatgttcctggtgaaatggcaggacctgtcggagaaggtggtctaccggcgcttcaccgag

SEQ ID NO: 33148 - RNA, 81 nt, synthetic construct
  source 1..81: mol_type = other RNA
ctggctttcccccaggtatacatgttcctggtgaaatggcaggacctgtcggagaaggtggtctaccggcgcttcaccgag

SEQ ID NO: 33149 - RNA, 81 nt, synthetic construct
  source 1..81: mol_type = other RNA
ctggctttcccccaggtctacatgttcctggtgaaatggcaggacctgtcggagaaggtggtctaccggcgcttcaccgag

SEQ ID NO: 33150 - RNA, 82 nt, synthetic construct
  source 1..82: mol_type = other RNA
tctggctttcccccaggtatacatgttcctggtgaaatggcaggacctgtcggagaaggtggtctaccggcgcttcaccgag

SEQ ID NO: 33151 - RNA, 82 nt, synthetic construct
  source 1..82: mol_type = other RNA
tctggctttcccccaggtctacatgttcctggtgaaatggcaggacctgtcggagaaggtggtctaccggcgcttcaccgag

SEQ ID NO: 33152 - RNA, 82 nt, synthetic construct
  source 1..82: mol_type = other RNA
tctggctttcccccaggtttacatgttcctggtgaaatggcaggacctgtcggagaaggtggtctaccggcgcttcaccgag

SEQ ID NO: 33153 - RNA, 82 nt, synthetic construct
  source 1..82: mol_type = other RNA
tctggctttcccccaggtgtacatgttcctggtgaaatggcaggacctgtcggagaaggtggtctaccggcgcttcaccgag

SEQ ID NO: 33154 - RNA, 83 nt, synthetic construct
  source 1..83: mol_type = other RNA
ctctggctttcccccaggtatacatgttcctggtgaaatggcaggacctgtcggagaaggtggtctaccggcgcttcaccgag

SEQ ID NO: 33155 - RNA, 83 nt, synthetic construct
  source 1..83: mol_type = other RNA
ctctggctttcccccaggtctacatgttcctggtgaaatggcaggacctgtcggagaaggtggtctaccggcgcttcaccgag

SEQ ID NO: 33156 - RNA, 83 nt, synthetic construct
  source 1..83: mol_type = other RNA
ctctggctttcccccaggtgtacatgttcctggtgaaatggcaggacctgtcggagaaggtggtctaccggcgcttcaccgag

SEQ ID NO: 33157 - RNA, 83 nt, synthetic construct
  source 1..83: mol_type = other RNA
ctctggctttcccccaggtttacatgttcctggtgaaatggcaggacctgtcggagaaggtggtctaccggcgcttcaccgag

SEQ ID NO: 33158 - RNA, 84 nt, synthetic construct
  source 1..84: mol_type = other RNA
actctggctttcccccaggtatacatgttcctggtgaaatggcaggacctgtcggagaaggtggtctaccggcgcttcaccgag

SEQ ID NO: 33159 - RNA, 84 nt, synthetic construct
  source 1..84: mol_type = other RNA
actctggctttcccccaggtttacatgttcctggtgaaatggcaggacctgtcggagaaggtggtctaccggcgcttcaccgag

SEQ ID NO: 33160 - RNA, 84 nt, synthetic construct
  source 1..84: mol_type = other RNA
actctggctttcccccaggtctacatgttcctggtgaaatggcaggacctgtcggagaaggtggtctaccggcgcttcaccgag

SEQ ID NO: 33161 - RNA, 84 nt, synthetic construct
  source 1..84: mol_type = other RNA
actctggctttcccccaggtgtacatgttcctggtgaaatggcaggacctgtcggagaaggtggtctaccggcgcttcaccgag

SEQ ID NO: 33162 - RNA, 85 nt, synthetic construct
  source 1..85: mol_type = other RNA
gactctggctttcccccaggtatacatgttcctggtgaaatggcaggacctgtcggagaaggtggtctaccggcgcttcaccgag

SEQ ID NO: 33163 - RNA, 85 nt, synthetic construct
  source 1..85: mol_type = other RNA
gactctggctttcccccaggtgtacatgttcctggtgaaatggcaggacctgtcggagaaggtggtctaccggcgcttcaccgag

SEQ ID NO: 33164 - RNA, 85 nt, synthetic construct
  source 1..85: mol_type = other RNA
gactctggctttcccccaggtttacatgttcctggtgaaatggcaggacctgtcggagaaggtggtctaccggcgcttcaccgag

SEQ ID NO: 33165 - RNA, 85 nt, synthetic construct
  source 1..85: mol_type = other RNA
gactctggctttcccccaggtctacatgttcctggtgaaatggcaggacctgtcggagaaggtggtctaccggcgcttcaccgag

SEQ ID NO: 33166 - RNA, 86 nt, synthetic construct
  source 1..86: mol_type = other RNA
cgactctggctttcccccaggtgtacatgttcctggtgaaatggcaggacctgtcggagaaggtggtctaccggcgcttcaccgag

SEQ ID NO: 33167 - RNA, 86 nt, synthetic construct
  source 1..86: mol_type = other RNA
cgactctggctttcccccaggtctacatgttcctggtgaaatggcaggacctgtcggagaaggtggtctaccggcgcttcaccgag

SEQ ID NO: 33168 - RNA, 86 nt, synthetic construct
  source 1..86: mol_type = other RNA
cgactctggctttcccccaggtttacatgttcctggtgaaatggcaggacctgtcggagaaggtggtctaccggcgcttcaccgag

SEQ ID NO: 33169 - RNA, 86 nt, synthetic construct
  source 1..86: mol_type = other RNA
cgactctggctttcccccaggtatacatgttcctggtgaaatggcaggacctgtcggagaaggtggtctaccggcgcttcaccgag

SEQ ID NO: 33170 - RNA, 87 nt, synthetic construct
  source 1..87: mol_type = other RNA
ccgactctggctttcccccaggtatacatgttcctggtgaaatggcaggacctgtcggagaaggtggtctaccggcgcttcaccgag

SEQ ID NO: 33171 - RNA, 87 nt, synthetic construct
  source 1..87: mol_type = other RNA
ccgactctggctttcccccaggtgtacatgttcctggtgaaatggcaggacctgtcggagaaggtggtctaccggcgcttcaccgag

SEQ ID NO: 33172 - RNA, 87 nt, synthetic construct
  source 1..87: mol_type = other RNA
ccgactctggctttcccccaggtttacatgttcctggtgaaatggcaggacctgtcggagaaggtggtctaccggcgcttcaccgag

SEQ ID NO: 33173 - RNA, 87 nt, synthetic construct
  source 1..87: mol_type = other RNA
ccgactctggctttcccccaggtctacatgttcctggtgaaatggcaggacctgtcggagaaggtggtctaccggcgcttcaccgag

SEQ ID NO: 33174 - RNA, 88 nt, synthetic construct
  source 1..88: mol_type = other RNA
cccgactctggctttcccccaggtttacatgttcctggtgaaatggcaggacctgtcggagaaggtggtctaccggcgcttcaccgag

SEQ ID NO: 33175 - RNA, 88 nt, synthetic construct
  source 1..88: mol_type = other RNA
cccgactctggctttcccccaggtatacatgttcctggtgaaatggcaggacctgtcggagaaggtggtctaccggcgcttcaccgag

SEQ ID NO: 33176 - RNA, 88 nt, synthetic construct
  source 1..88: mol_type = other RNA
cccgactctggctttcccccaggtgtacatgttcctggtgaaatggcaggacctgtcggagaaggtggtctaccggcgcttcaccgag

SEQ ID NO: 33177 - RNA, 88 nt, synthetic construct
  source 1..88: mol_type = other RNA
cccgactctggctttcccccaggtctacatgttcctggtgaaatggcaggacctgtcggagaaggtggtctaccggcgcttcaccgag

SEQ ID NO: 33178 - RNA, 89 nt, synthetic construct
  source 1..89: mol_type = other RNA
ccccgactctggctttcccccaggtctacatgttcctggtgaaatggcaggacctgtcggagaaggtggtctaccggcgcttcaccgag

SEQ ID NO: 33179 - RNA, 89 nt, synthetic construct
  source 1..89: mol_type = other RNA
ccccgactctggctttcccccaggtatacatgttcctggtgaaatggcaggacctgtcggagaaggtggtctaccggcgcttcaccgag

SEQ ID NO: 33180 - RNA, 89 nt, synthetic construct
  source 1..89: mol_type = other RNA
ccccgactctggctttcccccaggtgtacatgttcctggtgaaatggcaggacctgtcggagaaggtggtctaccggcgcttcaccgag

SEQ ID NO: 33181 - RNA, 89 nt, synthetic construct
  source 1..89: mol_type = other RNA
ccccgactctggctttcccccaggtttacatgttcctggtgaaatggcaggacctgtcggagaaggtggtctaccggcgcttcaccgag

SEQ ID NO: 33182 - RNA, 90 nt, synthetic construct
  source 1..90: mol_type = other RNA
cccccgactctggctttcccccaggtgtacatgttcctggtgaaatggcaggacctgtcggagaaggtggtctaccggcgcttcaccgag

SEQ ID NO: 33183 - RNA, 90 nt, synthetic construct
  source 1..90: mol_type = other RNA
cccccgactctggctttcccccaggtctacatgttcctggtgaaatggcaggacctgtcggagaaggtggtctaccggcgcttcaccgag

SEQ ID NO: 33184 - RNA, 90 nt, synthetic construct
  source 1..90: mol_type = other RNA
cccccgactctggctttcccccaggtttacatgttcctggtgaaatggcaggacctgtcggagaaggtggtctaccggcgcttcaccgag

SEQ ID NO: 33185 - RNA, 90 nt, synthetic construct
  source 1..90: mol_type = other RNA
cccccgactctggctttcccccaggtatacatgttcctggtgaaatggcaggacctgtcggagaaggtggtctaccggcgcttcaccgag

SEQ ID NO: 33186 - RNA, 91 nt, synthetic construct
  source 1..91: mol_type = other RNA
tcccccgactctggctttcccccaggtatacatgttcctggtgaaatggcaggacctgtcggagaaggtggtctaccggcgcttcaccgag

SEQ ID NO: 33187 - RNA, 91 nt, synthetic construct
  source 1..91: mol_type = other RNA
tcccccgactctggctttcccccaggtgtacatgttcctggtgaaatggcaggacctgtcggagaaggtggtctaccggcgcttcaccgag

SEQ ID NO: 33188 - RNA, 91 nt, synthetic construct
  source 1..91: mol_type = other RNA
tcccccgactctggctttcccccaggtttacatgttcctggtgaaatggcaggacctgtcggagaaggtggtctaccggcgcttcaccgag

SEQ ID NO: 33189 - RNA, 91 nt, synthetic construct
  source 1..91: mol_type = other RNA
tcccccgactctggctttcccccaggtctacatgttcctggtgaaatggcaggacctgtcggagaaggtggtctaccggcgcttcaccgag

SEQ ID NO: 33190 - RNA, 92 nt, synthetic construct
  source 1..92: mol_type = other RNA
gtcccccgactctggctttcccccaggtatacatgttcctggtgaaatggcaggacctgtcggagaaggtggtctaccggcgcttcaccgag

SEQ ID NO: 33191 - RNA, 92 nt, synthetic construct
  source 1..92: mol_type = other RNA
gtcccccgactctggctttcccccaggtctacatgttcctggtgaaatggcaggacctgtcggagaaggtggtctaccggcgcttcaccgag

SEQ ID NO: 33192 - RNA, 92 nt, synthetic construct
  source 1..92: mol_type = other RNA
gtcccccgactctggctttcccccaggtgtacatgttcctggtgaaatggcaggacctgtcggagaaggtggtctaccggcgcttcaccgag

SEQ ID NO: 33193 - RNA, 92 nt, synthetic construct
  source 1..92: mol_type = other RNA
gtcccccgactctggctttcccccaggtttacatgttcctggtgaaatggcaggacctgtcggagaaggtggtctaccggcgcttcaccgag

SEQ ID NO: 33194 - RNA, 93 nt, synthetic construct
  source 1..93: mol_type = other RNA
ggtcccccgactctggctttcccccaggtatacatgttcctggtgaaatggcaggacctgtcggagaaggtggtctaccggcgcttcaccgag

SEQ ID NO: 33195 - RNA, 93 nt, synthetic construct
  source 1..93: mol_type = other RNA
ggtcccccgactctggctttcccccaggtgtacatgttcctggtgaaatggcaggacctgtcggagaaggtggtctaccggcgcttcaccgag

SEQ ID NO: 33196 - RNA, 93 nt, synthetic construct
  source 1..93: mol_type = other RNA
ggtcccccgactctggctttcccccaggtctacatgttcctggtgaaatggcaggacctgtcggagaaggtggtctaccggcgcttcaccgag

SEQ ID NO: 33197 - RNA, 93 nt, synthetic construct
  source 1..93: mol_type = other RNA
ggtcccccgactctggctttcccccaggtttacatgttcctggtgaaatggcaggacctgtcggagaaggtggtctaccggcgcttcaccgag

SEQ ID NO: 33198 - RNA, 94 nt, synthetic construct
  source 1..94: mol_type = other RNA
gggtcccccgactctggctttcccccaggtatacatgttcctggtgaaatggcaggacctgtcggagaaggtggtctaccggcgcttcaccgag

SEQ ID NO: 33199 - RNA, 94 nt, synthetic construct
  source 1..94: mol_type = other RNA
gggtcccccgactctggctttcccccaggtgtacatgttcctggtgaaatggcaggacctgtcggagaaggtggtctaccggcgcttcaccgag

SEQ ID NO: 33200 - RNA, 94 nt, synthetic construct
  source 1..94: mol_type = other RNA
gggtcccccgactctggctttcccccaggtttacatgttcctggtgaaatggcaggacctgtcggagaaggtggtctaccggcgcttcaccgag

SEQ ID NO: 33201 - RNA, 94 nt, synthetic construct
  source 1..94: mol_type = other RNA
gggtcccccgactctggctttcccccaggtctacatgttcctggtgaaatggcaggacctgtcggagaaggtggtctaccggcgcttcaccgag

SEQ ID NO: 33202 - RNA, 95 nt, synthetic construct
  source 1..95: mol_type = other RNA
ggggtcccccgactctggctttcccccaggtctacatgttcctggtgaaatggcaggacctgtcggagaaggtggtctaccggcgcttcaccgag

SEQ ID NO: 33203 - RNA, 95 nt, synthetic construct
  source 1..95: mol_type = other RNA
ggggtcccccgactctggctttcccccaggtatacatgttcctggtgaaatggcaggacctgtcggagaaggtggtctaccggcgcttcaccgag

SEQ ID NO: 33204 - RNA, 95 nt, synthetic construct
  source 1..95: mol_type = other RNA
ggggtcccccgactctggctttcccccaggtgtacatgttcctggtgaaatggcaggacctgtcggagaaggtggtctaccggcgcttcaccgag

SEQ ID NO: 33205 - RNA, 95 nt, synthetic construct
  source 1..95: mol_type = other RNA
ggggtcccccgactctggctttcccccaggtttacatgttcctggtgaaatggcaggacctgtcggagaaggtggtctaccggcgcttcaccgag

SEQ ID NO: 33206 - RNA, 96 nt, synthetic construct
  source 1..96: mol_type = other RNA
tggggtcccccgactctggctttcccccaggtgtacatgttcctggtgaaatggcaggacctgtcggagaaggtggtctaccggcgcttcaccgag

SEQ ID NO: 33207 - RNA, 96 nt, synthetic construct
  source 1..96: mol_type = other RNA
tggggtcccccgactctggctttcccccaggtatacatgttcctggtgaaatggcaggacctgtcggagaaggtggtctaccggcgcttcaccgag

SEQ ID NO: 33208 - RNA, 96 nt, synthetic construct
  source 1..96: mol_type = other RNA
tggggtcccccgactctggctttcccccaggtctacatgttcctggtgaaatggcaggacctgtcggagaaggtggtctaccggcgcttcaccgag

SEQ ID NO: 33209 - RNA, 96 nt, synthetic construct
  source 1..96: mol_type = other RNA
tggggtcccccgactctggctttcccccaggtttacatgttcctggtgaaatggcaggacctgtcggagaaggtggtctaccggcgcttcaccgag

SEQ ID NO: 33210 - RNA, 97 nt, synthetic construct
  source 1..97: mol_type = other RNA
atggggtcccccgactctggctttcccccaggtttacatgttcctggtgaaatggcaggacctgtcggagaaggtggtctaccggcgcttcaccgag

SEQ ID NO: 33211 - RNA, 97 nt, synthetic construct
  source 1..97: mol_type = other RNA
atggggtcccccgactctggctttcccccaggtgtacatgttcctggtgaaatggcaggacctgtcggagaaggtggtctaccggcgcttcaccgag

SEQ ID NO: 33212 - RNA, 97 nt, synthetic construct
  source 1..97: mol_type = other RNA
atggggtcccccgactctggctttcccccaggtctacatgttcctggtgaaatggcaggacctgtcggagaaggtggtctaccggcgcttcaccgag

SEQ ID NO: 33213 - RNA, 97 nt, synthetic construct
  source 1..97: mol_type = other RNA
atggggtcccccgactctggctttcccccaggtatacatgttcctggtgaaatggcaggacctgtcggagaaggtggtctaccggcgcttcaccgag

SEQ ID NO: 33214 - RNA, 98 nt, synthetic construct
  source 1..98: mol_type = other RNA
aatggggtcccccgactctggctttcccccaggtctacatgttcctggtgaaatggcaggacctgtcggagaaggtggtctaccggcgcttcaccgag

SEQ ID NO: 33215 - RNA, 98 nt, synthetic construct
  source 1..98: mol_type = other RNA
aatggggtcccccgactctggctttcccccaggtgtacatgttcctggtgaaatggcaggacctgtcggagaaggtggtctaccggcgcttcaccgag

SEQ ID NO: 33216 - RNA, 98 nt, synthetic construct
  source 1..98: mol_type = other RNA
aatggggtcccccgactctggctttcccccaggtttacatgttcctggtgaaatggcaggacctgtcggagaaggtggtctaccggcgcttcaccgag

SEQ ID NO: 33217 - RNA, 98 nt, synthetic construct
  source 1..98: mol_type = other RNA
aatggggtcccccgactctggctttcccccaggtatacatgttcctggtgaaatggcaggacctgtcggagaaggtggtctaccggcgcttcaccgag

SEQ ID NO: 33218 - RNA, 99 nt, synthetic construct
  source 1..99: mol_type = other RNA
gaatggggtcccccgactctggctttcccccaggtgtacatgttcctggtgaaatggcaggacctgtcggagaaggtggtctaccggcgcttcaccgag

SEQ ID NO: 33219 - RNA, 99 nt, synthetic construct
  source 1..99: mol_type = other RNA
gaatggggtcccccgactctggctttcccccaggtttacatgttcctggtgaaatggcaggacctgtcggagaaggtggtctaccggcgcttcaccgag

SEQ ID NO: 33220 - RNA, 99 nt, synthetic construct
  source 1..99: mol_type = other RNA
gaatggggtcccccgactctggctttcccccaggtctacatgttcctggtgaaatggcaggacctgtcggagaaggtggtctaccggcgcttcaccgag

SEQ ID NO: 33221 - RNA, 99 nt, synthetic construct
  source 1..99: mol_type = other RNA
gaatggggtcccccgactctggctttcccccaggtatacatgttcctggtgaaatggcaggacctgtcggagaaggtggtctaccggcgcttcaccgag

SEQ ID NO: 33222 - RNA, 100 nt, synthetic construct
  source 1..100: mol_type = other RNA
tgaatggggtcccccgactctggctttcccccaggtttacatgttcctggtgaaatggcaggacctgtcggagaaggtggtctaccggcgcttcaccgag

SEQ ID NO: 33223 - RNA, 100 nt, synthetic construct
  source 1..100: mol_type = other RNA
tgaatggggtcccccgactctggctttcccccaggtgtacatgttcctggtgaaatggcaggacctgtcggagaaggtggtctaccggcgcttcaccgag

SEQ ID NO: 33224 - RNA, 100 nt, synthetic construct
  source 1..100: mol_type = other RNA
tgaatggggtcccccgactctggctttcccccaggtctacatgttcctggtgaaatggcaggacctgtcggagaaggtggtctaccggcgcttcaccgag

SEQ ID NO: 33225 - RNA, 100 nt, synthetic construct
  source 1..100: mol_type = other RNA
tgaatggggtcccccgactctggctttcccccaggtatacatgttcctggtgaaatggcaggacctgtcggagaaggtggtctaccggcgcttcaccgag

SEQ ID NO: 33226 - RNA, 101 nt, synthetic construct
  source 1..101: mol_type = other RNA
ctgaatggggtcccccgactctggctttcccccaggtttacatgttcctggtgaaatggcaggacctgtcggagaaggtggtctaccggcgcttcaccgag

SEQ ID NO: 33227 - RNA, 101 nt, synthetic construct
  source 1..101: mol_type = other RNA
ctgaatggggtcccccgactctggctttcccccaggtgtacatgttcctggtgaaatggcaggacctgtcggagaaggtggtctaccggcgcttcaccgag

SEQ ID NO: 33228 - RNA, 101 nt, synthetic construct
  source 1..101: mol_type = other RNA
ctgaatggggtcccccgactctggctttcccccaggtctacatgttcctggtgaaatggcaggacctgtcggagaaggtggtctaccggcgcttcaccgag

SEQ ID NO: 33229 - RNA, 101 nt, synthetic construct
  source 1..101: mol_type = other RNA
ctgaatggggtcccccgactctggctttcccccaggtatacatgttcctggtgaaatggcaggacctgtcggagaaggtggtctaccggcgcttcaccgag

SEQ ID NO: 33230 - RNA, 102 nt, synthetic construct
  source 1..102: mol_type = other RNA
gctgaatggggtcccccgactctggctttcccccaggtctacatgttcctggtgaaatggcaggacctgtcggagaaggtggtctaccggcgcttcaccgag

SEQ ID NO: 33231 - RNA, 102 nt, synthetic construct
  source 1..102: mol_type = other RNA
gctgaatggggtcccccgactctggctttcccccaggtatacatgttcctggtgaaatggcaggacctgtcggagaaggtggtctaccggcgcttcaccgag

SEQ ID NO: 33232 - RNA, 102 nt, synthetic construct
  source 1..102: mol_type = other RNA
gctgaatggggtcccccgactctggctttcccccaggtttacatgttcctggtgaaatggcaggacctgtcggagaaggtggtctaccggcgcttcaccgag

SEQ ID NO: 33233 - RNA, 102 nt, synthetic construct
  source 1..102: mol_type = other RNA
gctgaatggggtcccccgactctggctttcccccaggtgtacatgttcctggtgaaatggcaggacctgtcggagaaggtggtctaccggcgcttcaccgag

SEQ ID NO: 33234 - RNA, 103 nt, synthetic construct
  source 1..103: mol_type = other RNA
ggctgaatggggtcccccgactctggctttcccccaggtatacatgttcctggtgaaatggcaggacctgtcggagaaggtggtctaccggcgcttcaccgag

SEQ ID NO: 33235 - RNA, 103 nt, synthetic construct
  source 1..103: mol_type = other RNA
ggctgaatggggtcccccgactctggctttcccccaggtctacatgttcctggtgaaatggcaggacctgtcggagaaggtggtctaccggcgcttcaccgag

SEQ ID NO: 33236 - RNA, 103 nt, synthetic construct
  source 1..103: mol_type = other RNA
ggctgaatggggtcccccgactctggctttcccccaggtgtacatgttcctggtgaaatggcaggacctgtcggagaaggtggtctaccggcgcttcaccgag

SEQ ID NO: 33237 - RNA, 103 nt, synthetic construct
  source 1..103: mol_type = other RNA
ggctgaatggggtcccccgactctggctttcccccaggtttacatgttcctggtgaaatggcaggacctgtcggagaaggtggtctaccggcgcttcaccgag

SEQ ID NO: 33238 - RNA, 16 nt, synthetic construct
  source 1..16: mol_type = other RNA
tcctgccatttcacca

SEQ ID NO: 33239 - RNA, 17 nt, synthetic construct
  source 1..17: mol_type = other RNA
gtcctgccatttcacca

SEQ ID NO: 33240 - RNA, 18 nt, synthetic construct
  source 1..18: mol_type = other RNA
ggtcctgccatttcacca

SEQ ID NO: 33241 - RNA, 19 nt, synthetic construct
  source 1..19: mol_type = other RNA
aggtcctgccatttcacca

SEQ ID NO: 33242 - RNA, 20 nt, synthetic construct
  source 1..20: mol_type = other RNA
caggtcctgccatttcacca

SEQ ID NO: 33243 - RNA, 21 nt, synthetic construct
  source 1..21: mol_type = other RNA
acaggtcctgccatttcacca

SEQ ID NO: 33244 - RNA, 22 nt, synthetic construct
  source 1..22: mol_type = other RNA
gacaggtcctgccatttcacca

SEQ ID NO: 33245-33250 - skipped (6 entries)

SEQ ID NO: 33251 - RNA, 10 nt, synthetic construct
  source 1..10: mol_type = other RNA
tgaaatggca

SEQ ID NO: 33252 - RNA, 11 nt, synthetic construct
  source 1..11: mol_type = other RNA
tgaaatggcag

SEQ ID NO: 33253 - RNA, 12 nt, synthetic construct
  source 1..12: mol_type = other RNA
tgaaatggcagg

SEQ ID NO: 33254 - RNA, 13 nt, synthetic construct
  source 1..13: mol_type = other RNA
tgaaatggcagga

SEQ ID NO: 33255 - RNA, 14 nt, synthetic construct
  source 1..14: mol_type = other RNA
tgaaatggcaggac

SEQ ID NO: 33256 - RNA, 15 nt, synthetic construct
  source 1..15: mol_type = other RNA
tgaaatggcaggacc

SEQ ID NO: 33257 - RNA, 16 nt, synthetic construct
  source 1..16: mol_type = other RNA
tgaaatggcaggacct

SEQ ID NO: 33258 - RNA, 17 nt, synthetic construct
  source 1..17: mol_type = other RNA
tgaaatggcaggacctg

SEQ ID NO: 33259 - RNA, 18 nt, synthetic construct
  source 1..18: mol_type = other RNA
tgaaatggcaggacctgt

SEQ ID NO: 33260 - RNA, 19 nt, synthetic construct
  source 1..19: mol_type = other RNA
tgaaatggcaggacctgtc

SEQ ID NO: 33261 - RNA, 16 nt, synthetic construct
  source 1..16: mol_type = other RNA
gtgtacatgttcctgg

SEQ ID NO: 33262 - RNA, 16 nt, synthetic construct
  source 1..16: mol_type = other RNA
gtctacatgttcctgg

SEQ ID NO: 33263 - RNA, 16 nt, synthetic construct
  source 1..16: mol_type = other RNA
gtatacatgtttctgg

SEQ ID NO: 33264 - RNA, 16 nt, synthetic construct
  source 1..16: mol_type = other RNA
gtatacatgttcctgg

SEQ ID NO: 33265 - RNA, 16 nt, synthetic construct
  source 1..16: mol_type = other RNA
gtctacatgtttctgg

SEQ ID NO: 33266 - RNA, 16 nt, synthetic construct
  source 1..16: mol_type = other RNA
gtgtacatgtttctgg

SEQ ID NO: 33267 - RNA, 16 nt, synthetic construct
  source 1..16: mol_type = other RNA
gtttacatgttcctgg

SEQ ID NO: 33268 - RNA, 16 nt, synthetic construct
  source 1..16: mol_type = other RNA
gtttacatgtttctgg

SEQ ID NO: 33269 - RNA, 17 nt, synthetic construct
  source 1..17: mol_type = other RNA
ggtatacatgtttctgg

SEQ ID NO: 33270 - RNA, 17 nt, synthetic construct
  source 1..17: mol_type = other RNA
ggtctacatgttcctgg

SEQ ID NO: 33271 - RNA, 17 nt, synthetic construct
  source 1..17: mol_type = other RNA
ggtttacatgtttctgg

SEQ ID NO: 33272 - RNA, 17 nt, synthetic construct
  source 1..17: mol_type = other RNA
ggtctacatgtttctgg

SEQ ID NO: 33273 - RNA, 17 nt, synthetic construct
  source 1..17: mol_type = other RNA
ggtttacatgttcctgg

SEQ ID NO: 33274 - RNA, 17 nt, synthetic construct
  source 1..17: mol_type = other RNA
ggtatacatgttcctgg

SEQ ID NO: 33275 - RNA, 17 nt, synthetic construct
  source 1..17: mol_type = other RNA
ggtgtacatgttcctgg

SEQ ID NO: 33276 - RNA, 17 nt, synthetic construct
  source 1..17: mol_type = other RNA
ggtgtacatgtttctgg

SEQ ID NO: 33277 - RNA, 18 nt, synthetic construct
  source 1..18: mol_type = other RNA
aggtctacatgttcctgg

SEQ ID NO: 33278 - RNA, 18 nt, synthetic construct
  source 1..18: mol_type = other RNA
aggtatacatgtttctgg

SEQ ID NO: 33279 - RNA, 18 nt, synthetic construct
  source 1..18: mol_type = other RNA
aggtttacatgtttctgg

SEQ ID NO: 33280 - RNA, 18 nt, synthetic construct
  source 1..18: mol_type = other RNA
aggtatacatgttcctgg

SEQ ID NO: 33281 - RNA, 18 nt, synthetic construct
  source 1..18: mol_type = other RNA
aggtctacatgtttctgg

SEQ ID NO: 33282 - RNA, 18 nt, synthetic construct
  source 1..18: mol_type = other RNA
aggtgtacatgttcctgg

SEQ ID NO: 33283 - RNA, 18 nt, synthetic construct
  source 1..18: mol_type = other RNA
aggtttacatgttcctgg

SEQ ID NO: 33284 - RNA, 18 nt, synthetic construct
  source 1..18: mol_type = other RNA
aggtgtacatgtttctgg

SEQ ID NO: 33285 - RNA, 19 nt, synthetic construct
  source 1..19: mol_type = other RNA
caggtatacatgtttctgg

SEQ ID NO: 33286 - RNA, 19 nt, synthetic construct
  source 1..19: mol_type = other RNA
caggtctacatgttcctgg

SEQ ID NO: 33287 - RNA, 19 nt, synthetic construct
  source 1..19: mol_type = other RNA
caggtgtacatgttcctgg

SEQ ID NO: 33288 - RNA, 19 nt, synthetic construct
  source 1..19: mol_type = other RNA
caggtgtacatgtttctgg

SEQ ID NO: 33289 - RNA, 19 nt, synthetic construct
  source 1..19: mol_type = other RNA
caggtttacatgtttctgg

SEQ ID NO: 33290 - RNA, 19 nt, synthetic construct
  source 1..19: mol_type = other RNA
caggtctacatgtttctgg

SEQ ID NO: 33291 - RNA, 19 nt, synthetic construct
  source 1..19: mol_type = other RNA
caggtatacatgttcctgg

SEQ ID NO: 33292 - RNA, 19 nt, synthetic construct
  source 1..19: mol_type = other RNA
caggtttacatgttcctgg

SEQ ID NO: 33293 - RNA, 20 nt, synthetic construct
  source 1..20: mol_type = other RNA
ccaggtctacatgtttctgg

SEQ ID NO: 33294 - RNA, 20 nt, synthetic construct
  source 1..20: mol_type = other RNA
ccaggtatacatgtttctgg

SEQ ID NO: 33295 - RNA, 20 nt, synthetic construct
  source 1..20: mol_type = other RNA
ccaggtctacatgttcctgg

SEQ ID NO: 33296 - RNA, 20 nt, synthetic construct
  source 1..20: mol_type = other RNA
ccaggtttacatgtttctgg

SEQ ID NO: 33297 - RNA, 20 nt, synthetic construct
  source 1..20: mol_type = other RNA
ccaggtatacatgttcctgg

SEQ ID NO: 33298 - RNA, 20 nt, synthetic construct
  source 1..20: mol_type = other RNA
ccaggtgtacatgtttctgg

SEQ ID NO: 33299 - RNA, 20 nt, synthetic construct
  source 1..20: mol_type = other RNA
ccaggtgtacatgttcctgg

SEQ ID NO: 33300 - RNA, 20 nt, synthetic construct
  source 1..20: mol_type = other RNA
ccaggtttacatgttcctgg

SEQ ID NO: 33301 - RNA, 21 nt, synthetic construct
  source 1..21: mol_type = other RNA
cccaggtgtacatgtttctgg

SEQ ID NO: 33302 - RNA, 21 nt, synthetic construct
  source 1..21: mol_type = other RNA
cccaggtttacatgtttctgg

SEQ ID NO: 33303 - RNA, 21 nt, synthetic construct
  source 1..21: mol_type = other RNA
cccaggtgtacatgttcctgg

SEQ ID NO: 33304 - RNA, 21 nt, synthetic construct
  source 1..21: mol_type = other RNA
cccaggtttacatgttcctgg

SEQ ID NO: 33305 - RNA, 21 nt, synthetic construct
  source 1..21: mol_type = other RNA
cccaggtctacatgttcctgg

SEQ ID NO: 33306 - RNA, 21 nt, synthetic construct
  source 1..21: mol_type = other RNA
cccaggtatacatgtttctgg

SEQ ID NO: 33307 - RNA, 21 nt, synthetic construct
  source 1..21: mol_type = other RNA
cccaggtatacatgttcctgg

SEQ ID NO: 33308 - RNA, 21 nt, synthetic construct
  source 1..21: mol_type = other RNA
cccaggtctacatgtttctgg

SEQ ID NO: 33309 - RNA, 22 nt, synthetic construct
  source 1..22: mol_type = other RNA
ccccaggtatacatgtttctgg

SEQ ID NO: 33310 - RNA, 22 nt, synthetic construct
  source 1..22: mol_type = other RNA
ccccaggtttacatgttcctgg

SEQ ID NO: 33311 - RNA, 22 nt, synthetic construct
  source 1..22: mol_type = other RNA
ccccaggtgtacatgtttctgg

SEQ ID NO: 33312 - RNA, 22 nt, synthetic construct
  source 1..22: mol_type = other RNA
ccccaggtgtacatgttcctgg

SEQ ID NO: 33313 - RNA, 22 nt, synthetic construct
  source 1..22: mol_type = other RNA
ccccaggtctacatgtttctgg

SEQ ID NO: 33314 - RNA, 22 nt, synthetic construct
  source 1..22: mol_type = other RNA
ccccaggtctacatgttcctgg

SEQ ID NO: 33315 - RNA, 22 nt, synthetic construct
  source 1..22: mol_type = other RNA
ccccaggtatacatgttcctgg

SEQ ID NO: 33316 - RNA, 22 nt, synthetic construct
  source 1..22: mol_type = other RNA
ccccaggtttacatgtttctgg

SEQ ID NO: 33317 - RNA, 23 nt, synthetic construct
  source 1..23: mol_type = other RNA
cccccaggtatacatgttcctgg

SEQ ID NO: 33318 - RNA, 23 nt, synthetic construct
  source 1..23: mol_type = other RNA
cccccaggtgtacatgttcctgg

SEQ ID NO: 33319 - RNA, 23 nt, synthetic construct
  source 1..23: mol_type = other RNA
cccccaggtttacatgttcctgg

SEQ ID NO: 33320 - RNA, 23 nt, synthetic construct
  source 1..23: mol_type = other RNA
cccccaggtatacatgtttctgg

SEQ ID NO: 33321 - RNA, 23 nt, synthetic construct
  source 1..23: mol_type = other RNA
cccccaggtctacatgttcctgg

SEQ ID NO: 33322 - RNA, 23 nt, synthetic construct
  source 1..23: mol_type = other RNA
cccccaggtttacatgtttctgg

SEQ ID NO: 33323 - RNA, 23 nt, synthetic construct
  source 1..23: mol_type = other RNA
cccccaggtctacatgtttctgg

SEQ ID NO: 33324 - RNA, 23 nt, synthetic construct
  source 1..23: mol_type = other RNA
cccccaggtgtacatgtttctgg

SEQ ID NO: 33325 - RNA, 24 nt, synthetic construct
  source 1..24: mol_type = other RNA
tcccccaggtatacatgttcctgg

SEQ ID NO: 33326 - RNA, 24 nt, synthetic construct
  source 1..24: mol_type = other RNA
tcccccaggtatacatgtttctgg

SEQ ID NO: 33327 - RNA, 24 nt, synthetic construct
  source 1..24: mol_type = other RNA
tcccccaggtttacatgttcctgg

SEQ ID NO: 33328 - RNA, 24 nt, synthetic construct
  source 1..24: mol_type = other RNA
tcccccaggtgtacatgtttctgg

SEQ ID NO: 33329 - RNA, 24 nt, synthetic construct
  source 1..24: mol_type = other RNA
tcccccaggtgtacatgttcctgg

SEQ ID NO: 33330 - RNA, 24 nt, synthetic construct
  source 1..24: mol_type = other RNA
tcccccaggtctacatgttcctgg

SEQ ID NO: 33331 - RNA, 24 nt, synthetic construct
  source 1..24: mol_type = other RNA
tcccccaggtttacatgtttctgg

SEQ ID NO: 33332 - RNA, 24 nt, synthetic construct
  source 1..24: mol_type = other RNA
tcccccaggtctacatgtttctgg

SEQ ID NO: 33333 - RNA, 25 nt, synthetic construct
  source 1..25: mol_type = other RNA
ttcccccaggtctacatgttcctgg

SEQ ID NO: 33334 - RNA, 25 nt, synthetic construct
  source 1..25: mol_type = other RNA
ttcccccaggtttacatgtttctgg

SEQ ID NO: 33335 - RNA, 25 nt, synthetic construct
  source 1..25: mol_type = other RNA
ttcccccaggtttacatgttcctgg

SEQ ID NO: 33336 - RNA, 25 nt, synthetic construct
  source 1..25: mol_type = other RNA
ttcccccaggtgtacatgtttctgg

SEQ ID NO: 33337 - RNA, 25 nt, synthetic construct
  source 1..25: mol_type = other RNA
ttcccccaggtgtacatgttcctgg

SEQ ID NO: 33338 - RNA, 25 nt, synthetic construct
  source 1..25: mol_type = other RNA
ttcccccaggtctacatgtttctgg

SEQ ID NO: 33339 - RNA, 25 nt, synthetic construct
  source 1..25: mol_type = other RNA
ttcccccaggtatacatgttcctgg

SEQ ID NO: 33340 - RNA, 25 nt, synthetic construct
  source 1..25: mol_type = other RNA
ttcccccaggtatacatgtttctgg

SEQ ID NO: 33341 - RNA, 26 nt, synthetic construct
  source 1..26: mol_type = other RNA
tttcccccaggtctacatgtttctgg

SEQ ID NO: 33342 - RNA, 26 nt, synthetic construct
  source 1..26: mol_type = other RNA
tttcccccaggtctacatgttcctgg

SEQ ID NO: 33343 - RNA, 26 nt, synthetic construct
  source 1..26: mol_type = other RNA
tttcccccaggtatacatgtttctgg

SEQ ID NO: 33344 - RNA, 26 nt, synthetic construct
  source 1..26: mol_type = other RNA
tttcccccaggtttacatgtttctgg

SEQ ID NO: 33345 - RNA, 26 nt, synthetic construct
  source 1..26: mol_type = other RNA
tttcccccaggtgtacatgtttctgg

SEQ ID NO: 33346 - RNA, 26 nt, synthetic construct
  source 1..26: mol_type = other RNA
tttcccccaggtttacatgttcctgg

SEQ ID NO: 33347 - RNA, 26 nt, synthetic construct
  source 1..26: mol_type = other RNA
tttcccccaggtgtacatgttcctgg

SEQ ID NO: 33348 - RNA, 26 nt, synthetic construct
  source 1..26: mol_type = other RNA
tttcccccaggtatacatgttcctgg

SEQ ID NO: 33349 - RNA, 27 nt, synthetic construct
  source 1..27: mol_type = other RNA
ctttcccccaggtatacatgttcctgg

SEQ ID NO: 33350 - RNA, 27 nt, synthetic construct
  source 1..27: mol_type = other RNA
ctttcccccaggtgtacatgtttctgg

SEQ ID NO: 33351 - RNA, 27 nt, synthetic construct
  source 1..27: mol_type = other RNA
ctttcccccaggtttacatgtttctgg

SEQ ID NO: 33352 - RNA, 27 nt, synthetic construct
  source 1..27: mol_type = other RNA
ctttcccccaggtctacatgtttctgg

SEQ ID NO: 33353 - RNA, 27 nt, synthetic construct
  source 1..27: mol_type = other RNA
ctttcccccaggtctacatgttcctgg

SEQ ID NO: 33354 - RNA, 27 nt, synthetic construct
  source 1..27: mol_type = other RNA
ctttcccccaggtatacatgtttctgg

SEQ ID NO: 33355 - RNA, 27 nt, synthetic construct
  source 1..27: mol_type = other RNA
ctttcccccaggtgtacatgttcctgg

SEQ ID NO: 33356 - RNA, 27 nt, synthetic construct
  source 1..27: mol_type = other RNA
ctttcccccaggtttacatgttcctgg

SEQ ID NO: 33357 - RNA, 28 nt, synthetic construct
  source 1..28: mol_type = other RNA
gctttcccccaggtatacatgttcctgg

SEQ ID NO: 33358 - RNA, 28 nt, synthetic construct
  source 1..28: mol_type = other RNA
gctttcccccaggtttacatgtttctgg

SEQ ID NO: 33359 - RNA, 28 nt, synthetic construct
  source 1..28: mol_type = other RNA
gctttcccccaggtatacatgtttctgg

SEQ ID NO: 33360 - RNA, 28 nt, synthetic construct
  source 1..28: mol_type = other RNA
gctttcccccaggtctacatgtttctgg

SEQ ID NO: 33361 - RNA, 28 nt, synthetic construct
  source 1..28: mol_type = other RNA
gctttcccccaggtctacatgttcctgg

SEQ ID NO: 33362 - RNA, 28 nt, synthetic construct
  source 1..28: mol_type = other RNA
gctttcccccaggtttacatgttcctgg

SEQ ID NO: 33363 - RNA, 28 nt, synthetic construct
  source 1..28: mol_type = other RNA
gctttcccccaggtgtacatgttcctgg

SEQ ID NO: 33364 - RNA, 28 nt, synthetic construct
  source 1..28: mol_type = other RNA
gctttcccccaggtgtacatgtttctgg

SEQ ID NO: 33365 - RNA, 29 nt, synthetic construct
  source 1..29: mol_type = other RNA
ggctttcccccaggtgtacatgtttctgg

SEQ ID NO: 33366 - RNA, 29 nt, synthetic construct
  source 1..29: mol_type = other RNA
ggctttcccccaggtctacatgttcctgg

SEQ ID NO: 33367 - RNA, 29 nt, synthetic construct
  source 1..29: mol_type = other RNA
ggctttcccccaggtctacatgtttctgg

SEQ ID NO: 33368 - RNA, 29 nt, synthetic construct
  source 1..29: mol_type = other RNA
ggctttcccccaggtgtacatgttcctgg

SEQ ID NO: 33369 - RNA, 29 nt, synthetic construct
  source 1..29: mol_type = other RNA
ggctttcccccaggtttacatgtttctgg

SEQ ID NO: 33370 - RNA, 29 nt, synthetic construct
  source 1..29: mol_type = other RNA
ggctttcccccaggtatacatgtttctgg

SEQ ID NO: 33371 - RNA, 29 nt, synthetic construct
  source 1..29: mol_type = other RNA
ggctttcccccaggtttacatgttcctgg

SEQ ID NO: 33372 - RNA, 29 nt, synthetic construct
  source 1..29: mol_type = other RNA
ggctttcccccaggtatacatgttcctgg

SEQ ID NO: 33373 - RNA, 30 nt, synthetic construct
  source 1..30: mol_type = other RNA
tggctttcccccaggtatacatgtttctgg

SEQ ID NO: 33374 - RNA, 30 nt, synthetic construct
  source 1..30: mol_type = other RNA
tggctttcccccaggtttacatgttcctgg

SEQ ID NO: 33375 - RNA, 30 nt, synthetic construct
  source 1..30: mol_type = other RNA
tggctttcccccaggtttacatgtttctgg

SEQ ID NO: 33376 - RNA, 30 nt, synthetic construct
  source 1..30: mol_type = other RNA
tggctttcccccaggtgtacatgttcctgg

SEQ ID NO: 33377 - RNA, 30 nt, synthetic construct
  source 1..30: mol_type = other RNA
tggctttcccccaggtctacatgtttctgg

SEQ ID NO: 33378 - RNA, 30 nt, synthetic construct
  source 1..30: mol_type = other RNA
tggctttcccccaggtctacatgttcctgg

SEQ ID NO: 33379 - RNA, 30 nt, synthetic construct
  source 1..30: mol_type = other RNA
tggctttcccccaggtgtacatgtttctgg

SEQ ID NO: 33380 - RNA, 30 nt, synthetic construct
  source 1..30: mol_type = other RNA
tggctttcccccaggtatacatgttcctgg

SEQ ID NO: 33381 - RNA, 31 nt, synthetic construct
  source 1..31: mol_type = other RNA
ctggctttcccccaggtatacatgttcctgg

SEQ ID NO: 33382 - RNA, 31 nt, synthetic construct
  source 1..31: mol_type = other RNA
ctggctttcccccaggtctacatgttcctgg

SEQ ID NO: 33383 - RNA, 31 nt, synthetic construct
  source 1..31: mol_type = other RNA
ctggctttcccccaggtgtacatgttcctgg

SEQ ID NO: 33384 - RNA, 31 nt, synthetic construct
  source 1..31: mol_type = other RNA
ctggctttcccccaggtctacatgtttctgg

SEQ ID NO: 33385 - RNA, 31 nt, synthetic construct
  source 1..31: mol_type = other RNA
ctggctttcccccaggtatacatgtttctgg

SEQ ID NO: 33386 - RNA, 31 nt, synthetic construct
  source 1..31: mol_type = other RNA
ctggctttcccccaggtttacatgttcctgg

SEQ ID NO: 33387 - RNA, 31 nt, synthetic construct
  source 1..31: mol_type = other RNA
ctggctttcccccaggtttacatgtttctgg

SEQ ID NO: 33388 - RNA, 31 nt, synthetic construct
  source 1..31: mol_type = other RNA
ctggctttcccccaggtgtacatgtttctgg

SEQ ID NO: 33389 - RNA, 32 nt, synthetic construct
  source 1..32: mol_type = other RNA
tctggctttcccccaggtgtacatgttcctgg

SEQ ID NO: 33390 - RNA, 32 nt, synthetic construct
  source 1..32: mol_type = other RNA
tctggctttcccccaggtttacatgtttctgg

SEQ ID NO: 33391 - RNA, 32 nt, synthetic construct
  source 1..32: mol_type = other RNA
tctggctttcccccaggtgtacatgtttctgg

SEQ ID NO: 33392 - RNA, 32 nt, synthetic construct
  source 1..32: mol_type = other RNA
tctggctttcccccaggtttacatgttcctgg

SEQ ID NO: 33393 - RNA, 32 nt, synthetic construct
  source 1..32: mol_type = other RNA
tctggctttcccccaggtatacatgttcctgg

SEQ ID NO: 33394 - RNA, 32 nt, synthetic construct
  source 1..32: mol_type = other RNA
tctggctttcccccaggtctacatgttcctgg

SEQ ID NO: 33395 - RNA, 32 nt, synthetic construct
  source 1..32: mol_type = other RNA
tctggctttcccccaggtctacatgtttctgg

SEQ ID NO: 33396 - RNA, 32 nt, synthetic construct
  source 1..32: mol_type = other RNA
tctggctttcccccaggtatacatgtttctgg

SEQ ID NO: 33397 - RNA, 33 nt, synthetic construct
  source 1..33: mol_type = other RNA
ctctggctttcccccaggtttacatgtttctgg

SEQ ID NO: 33398 - RNA, 33 nt, synthetic construct
  source 1..33: mol_type = other RNA
ctctggctttcccccaggtatacatgttcctgg

SEQ ID NO: 33399 - RNA, 33 nt, synthetic construct
  source 1..33: mol_type = other RNA
ctctggctttcccccaggtttacatgttcctgg

SEQ ID NO: 33400 - RNA, 33 nt, synthetic construct
  source 1..33: mol_type = other RNA
ctctggctttcccccaggtgtacatgtttctgg

SEQ ID NO: 33401 - RNA, 33 nt, synthetic construct
  source 1..33: mol_type = other RNA
ctctggctttcccccaggtgtacatgttcctgg

SEQ ID NO: 33402 - RNA, 33 nt, synthetic construct
  source 1..33: mol_type = other RNA
ctctggctttcccccaggtctacatgtttctgg

SEQ ID NO: 33403 - RNA, 33 nt, synthetic construct
  source 1..33: mol_type = other RNA
ctctggctttcccccaggtatacatgtttctgg

SEQ ID NO: 33404 - RNA, 33 nt, synthetic construct
  source 1..33: mol_type = other RNA
ctctggctttcccccaggtctacatgttcctgg

SEQ ID NO: 33405 - RNA, 34 nt, synthetic construct
  source 1..34: mol_type = other RNA
actctggctttcccccaggtttacatgttcctgg

SEQ ID NO: 33406 - RNA, 34 nt, synthetic construct
  source 1..34: mol_type = other RNA
actctggctttcccccaggtctacatgtttctgg

SEQ ID NO: 33407 - RNA, 34 nt, synthetic construct
  source 1..34: mol_type = other RNA
actctggctttcccccaggtctacatgttcctgg

SEQ ID NO: 33408 - RNA, 34 nt, synthetic construct
  source 1..34: mol_type = other RNA
actctggctttcccccaggtgtacatgttcctgg

SEQ ID NO: 33409 - RNA, 34 nt, synthetic construct
  source 1..34: mol_type = other RNA
actctggctttcccccaggtttacatgtttctgg

SEQ ID NO: 33410 - RNA, 34 nt, synthetic construct
  source 1..34: mol_type = other RNA
actctggctttcccccaggtgtacatgtttctgg

SEQ ID NO: 33411 - RNA, 34 nt, synthetic construct
  source 1..34: mol_type = other RNA
actctggctttcccccaggtatacatgttcctgg

SEQ ID NO: 33412 - RNA, 34 nt, synthetic construct
  source 1..34: mol_type = other RNA
actctggctttcccccaggtatacatgtttctgg

SEQ ID NO: 33413 - RNA, 35 nt, synthetic construct
  source 1..35: mol_type = other RNA
gactctggctttcccccaggtatacatgtttctgg

SEQ ID NO: 33414 - RNA, 35 nt, synthetic construct
  source 1..35: mol_type = other RNA
gactctggctttcccccaggtatacatgttcctgg

SEQ ID NO: 33415 - RNA, 35 nt, synthetic construct
  source 1..35: mol_type = other RNA
gactctggctttcccccaggtctacatgttcctgg

SEQ ID NO: 33416 - RNA, 35 nt, synthetic construct
  source 1..35: mol_type = other RNA
gactctggctttcccccaggtctacatgtttctgg

SEQ ID NO: 33417 - RNA, 35 nt, synthetic construct
  source 1..35: mol_type = other RNA
gactctggctttcccccaggtgtacatgttcctgg

SEQ ID NO: 33418 - RNA, 35 nt, synthetic construct
  source 1..35: mol_type = other RNA
gactctggctttcccccaggtgtacatgtttctgg

SEQ ID NO: 33419 - RNA, 35 nt, synthetic construct
  source 1..35: mol_type = other RNA
gactctggctttcccccaggtttacatgttcctgg

SEQ ID NO: 33420 - RNA, 35 nt, synthetic construct
  source 1..35: mol_type = other RNA
gactctggctttcccccaggtttacatgtttctgg

SEQ ID NO: 33421 - RNA, 36 nt, synthetic construct
  source 1..36: mol_type = other RNA
cgactctggctttcccccaggtgtacatgttcctgg

SEQ ID NO: 33422 - RNA, 36 nt, synthetic construct
  source 1..36: mol_type = other RNA
cgactctggctttcccccaggtatacatgttcctgg

SEQ ID NO: 33423 - RNA, 36 nt, synthetic construct
  source 1..36: mol_type = other RNA
cgactctggctttcccccaggtatacatgtttctgg

SEQ ID NO: 33424 - RNA, 36 nt, synthetic construct
  source 1..36: mol_type = other RNA
cgactctggctttcccccaggtctacatgttcctgg

SEQ ID NO: 33425 - RNA, 36 nt, synthetic construct
  source 1..36: mol_type = other RNA
cgactctggctttcccccaggtctacatgtttctgg

SEQ ID NO: 33426 - RNA, 36 nt, synthetic construct
  source 1..36: mol_type = other RNA
cgactctggctttcccccaggtttacatgtttctgg

SEQ ID NO: 33427 - RNA, 36 nt, synthetic construct
  source 1..36: mol_type = other RNA
cgactctggctttcccccaggtttacatgttcctgg

SEQ ID NO: 33428 - RNA, 36 nt, synthetic construct
  source 1..36: mol_type = other RNA
cgactctggctttcccccaggtgtacatgtttctgg

SEQ ID NO: 33429 - RNA, 37 nt, synthetic construct
  source 1..37: mol_type = other RNA
ccgactctggctttcccccaggtttacatgttcctgg

SEQ ID NO: 33430 - RNA, 37 nt, synthetic construct
  source 1..37: mol_type = other RNA
ccgactctggctttcccccaggtatacatgttcctgg

SEQ ID NO: 33431 - RNA, 37 nt, synthetic construct
  source 1..37: mol_type = other RNA
ccgactctggctttcccccaggtatacatgtttctgg

SEQ ID NO: 33432 - RNA, 37 nt, synthetic construct
  source 1..37: mol_type = other RNA
ccgactctggctttcccccaggtctacatgttcctgg

SEQ ID NO: 33433 - RNA, 37 nt, synthetic construct
  source 1..37: mol_type = other RNA
ccgactctggctttcccccaggtctacatgtttctgg

SEQ ID NO: 33434 - RNA, 37 nt, synthetic construct
  source 1..37: mol_type = other RNA
ccgactctggctttcccccaggtgtacatgttcctgg

SEQ ID NO: 33435 - RNA, 37 nt, synthetic construct
  source 1..37: mol_type = other RNA
ccgactctggctttcccccaggtgtacatgtttctgg

SEQ ID NO: 33436 - RNA, 37 nt, synthetic construct
  source 1..37: mol_type = other RNA
ccgactctggctttcccccaggtttacatgtttctgg

SEQ ID NO: 33437 - RNA, 38 nt, synthetic construct
  source 1..38: mol_type = other RNA
cccgactctggctttcccccaggtgtacatgtttctgg

SEQ ID NO: 33438 - RNA, 38 nt, synthetic construct
  source 1..38: mol_type = other RNA
cccgactctggctttcccccaggtttacatgtttctgg

SEQ ID NO: 33439 - RNA, 38 nt, synthetic construct
  source 1..38: mol_type = other RNA
cccgactctggctttcccccaggtttacatgttcctgg

SEQ ID NO: 33440 - RNA, 38 nt, synthetic construct
  source 1..38: mol_type = other RNA
cccgactctggctttcccccaggtctacatgtttctgg

SEQ ID NO: 33441 - RNA, 38 nt, synthetic construct
  source 1..38: mol_type = other RNA
cccgactctggctttcccccaggtctacatgttcctgg

SEQ ID NO: 33442 - RNA, 38 nt, synthetic construct
  source 1..38: mol_type = other RNA
cccgactctggctttcccccaggtatacatgttcctgg

SEQ ID NO: 33443 - RNA, 38 nt, synthetic construct
  source 1..38: mol_type = other RNA
cccgactctggctttcccccaggtgtacatgttcctgg

SEQ ID NO: 33444 - RNA, 38 nt, synthetic construct
  source 1..38: mol_type = other RNA
cccgactctggctttcccccaggtatacatgtttctgg

SEQ ID NO: 33445 - RNA, 39 nt, synthetic construct
  source 1..39: mol_type = other RNA
ccccgactctggctttcccccaggtatacatgttcctgg

SEQ ID NO: 33446 - RNA, 39 nt, synthetic construct
  source 1..39: mol_type = other RNA
ccccgactctggctttcccccaggtatacatgtttctgg

SEQ ID NO: 33447 - RNA, 39 nt, synthetic construct
  source 1..39: mol_type = other RNA
ccccgactctggctttcccccaggtctacatgttcctgg

SEQ ID NO: 33448 - RNA, 39 nt, synthetic construct
  source 1..39: mol_type = other RNA
ccccgactctggctttcccccaggtctacatgtttctgg

SEQ ID NO: 33449 - RNA, 39 nt, synthetic construct
  source 1..39: mol_type = other RNA
ccccgactctggctttcccccaggtgtacatgtttctgg

SEQ ID NO: 33450 - RNA, 39 nt, synthetic construct
  source 1..39: mol_type = other RNA
ccccgactctggctttcccccaggtgtacatgttcctgg

SEQ ID NO: 33451 - RNA, 39 nt, synthetic construct
  source 1..39: mol_type = other RNA
ccccgactctggctttcccccaggtttacatgtttctgg

SEQ ID NO: 33452 - RNA, 39 nt, synthetic construct
  source 1..39: mol_type = other RNA
ccccgactctggctttcccccaggtttacatgttcctgg

SEQ ID NO: 33453 - RNA, 40 nt, synthetic construct
  source 1..40: mol_type = other RNA
cccccgactctggctttcccccaggtttacatgttcctgg

SEQ ID NO: 33454 - RNA, 40 nt, synthetic construct
  source 1..40: mol_type = other RNA
cccccgactctggctttcccccaggtatacatgttcctgg

SEQ ID NO: 33455 - RNA, 40 nt, synthetic construct
  source 1..40: mol_type = other RNA
cccccgactctggctttcccccaggtatacatgtttctgg

SEQ ID NO: 33456 - RNA, 40 nt, synthetic construct
  source 1..40: mol_type = other RNA
cccccgactctggctttcccccaggtctacatgttcctgg

SEQ ID NO: 33457 - RNA, 40 nt, synthetic construct
  source 1..40: mol_type = other RNA
cccccgactctggctttcccccaggtttacatgtttctgg

SEQ ID NO: 33458 - RNA, 40 nt, synthetic construct
  source 1..40: mol_type = other RNA
cccccgactctggctttcccccaggtgtacatgtttctgg

SEQ ID NO: 33459 - RNA, 40 nt, synthetic construct
  source 1..40: mol_type = other RNA
cccccgactctggctttcccccaggtgtacatgttcctgg

SEQ ID NO: 33460 - RNA, 40 nt, synthetic construct
  source 1..40: mol_type = other RNA
cccccgactctggctttcccccaggtctacatgtttctgg

SEQ ID NO: 33461 - RNA, 41 nt, synthetic construct
  source 1..41: mol_type = other RNA
tcccccgactctggctttcccccaggtgtacatgttcctgg

SEQ ID NO: 33462 - RNA, 41 nt, synthetic construct
  source 1..41: mol_type = other RNA
tcccccgactctggctttcccccaggtttacatgtttctgg

SEQ ID NO: 33463 - RNA, 41 nt, synthetic construct
  source 1..41: mol_type = other RNA
tcccccgactctggctttcccccaggtttacatgttcctgg

SEQ ID NO: 33464 - RNA, 41 nt, synthetic construct
  source 1..41: mol_type = other RNA
tcccccgactctggctttcccccaggtatacatgttcctgg

SEQ ID NO: 33465 - RNA, 41 nt, synthetic construct
  source 1..41: mol_type = other RNA
tcccccgactctggctttcccccaggtatacatgtttctgg

SEQ ID NO: 33466 - RNA, 41 nt, synthetic construct
  source 1..41: mol_type = other RNA
tcccccgactctggctttcccccaggtctacatgttcctgg

SEQ ID NO: 33467 - RNA, 41 nt, synthetic construct
  source 1..41: mol_type = other RNA
tcccccgactctggctttcccccaggtctacatgtttctgg

SEQ ID NO: 33468 - RNA, 41 nt, synthetic construct
  source 1..41: mol_type = other RNA
tcccccgactctggctttcccccaggtgtacatgtttctgg

SEQ ID NO: 33469 - RNA, 42 nt, synthetic construct
  source 1..42: mol_type = other RNA
gtcccccgactctggctttcccccaggtctacatgtttctgg

SEQ ID NO: 33470 - RNA, 42 nt, synthetic construct
  source 1..42: mol_type = other RNA
gtcccccgactctggctttcccccaggtgtacatgttcctgg

SEQ ID NO: 33471 - RNA, 42 nt, synthetic construct
  source 1..42: mol_type = other RNA
gtcccccgactctggctttcccccaggtttacatgttcctgg

SEQ ID NO: 33472 - RNA, 42 nt, synthetic construct
  source 1..42: mol_type = other RNA
gtcccccgactctggctttcccccaggtttacatgtttctgg

SEQ ID NO: 33473 - RNA, 42 nt, synthetic construct
  source 1..42: mol_type = other RNA
gtcccccgactctggctttcccccaggtatacatgtttctgg

SEQ ID NO: 33474 - RNA, 42 nt, synthetic construct
  source 1..42: mol_type = other RNA
gtcccccgactctggctttcccccaggtatacatgttcctgg

SEQ ID NO: 33475 - RNA, 42 nt, synthetic construct
  source 1..42: mol_type = other RNA
gtcccccgactctggctttcccccaggtgtacatgtttctgg

SEQ ID NO: 33476 - RNA, 42 nt, synthetic construct
  source 1..42: mol_type = other RNA
gtcccccgactctggctttcccccaggtctacatgttcctgg

SEQ ID NO: 33477 - RNA, 43 nt, synthetic construct
  source 1..43: mol_type = other RNA
ggtcccccgactctggctttcccccaggtgtacatgttcctgg

SEQ ID NO: 33478 - RNA, 43 nt, synthetic construct
  source 1..43: mol_type = other RNA
ggtcccccgactctggctttcccccaggtatacatgtttctgg

SEQ ID NO: 33479 - RNA, 43 nt, synthetic construct
  source 1..43: mol_type = other RNA
ggtcccccgactctggctttcccccaggtctacatgttcctgg

SEQ ID NO: 33480 - RNA, 43 nt, synthetic construct
  source 1..43: mol_type = other RNA
ggtcccccgactctggctttcccccaggtttacatgtttctgg

SEQ ID NO: 33481 - RNA, 43 nt, synthetic construct
  source 1..43: mol_type = other RNA
ggtcccccgactctggctttcccccaggtctacatgtttctgg

SEQ ID NO: 33482 - RNA, 43 nt, synthetic construct
  source 1..43: mol_type = other RNA
ggtcccccgactctggctttcccccaggtttacatgttcctgg

SEQ ID NO: 33483 - RNA, 43 nt, synthetic construct
  source 1..43: mol_type = other RNA
ggtcccccgactctggctttcccccaggtatacatgttcctgg

SEQ ID NO: 33484 - RNA, 43 nt, synthetic construct
  source 1..43: mol_type = other RNA
ggtcccccgactctggctttcccccaggtgtacatgtttctgg

SEQ ID NO: 33485 - RNA, 44 nt, synthetic construct
  source 1..44: mol_type = other RNA
gggtcccccgactctggctttcccccaggtatacatgttcctgg

SEQ ID NO: 33486 - RNA, 44 nt, synthetic construct
  source 1..44: mol_type = other RNA
gggtcccccgactctggctttcccccaggtttacatgttcctgg

SEQ ID NO: 33487 - RNA, 44 nt, synthetic construct
  source 1..44: mol_type = other RNA
gggtcccccgactctggctttcccccaggtgtacatgtttctgg

SEQ ID NO: 33488 - RNA, 44 nt, synthetic construct
  source 1..44: mol_type = other RNA
gggtcccccgactctggctttcccccaggtttacatgtttctgg

SEQ ID NO: 33489 - RNA, 44 nt, synthetic construct
  source 1..44: mol_type = other RNA
gggtcccccgactctggctttcccccaggtctacatgttcctgg

SEQ ID NO: 33490 - RNA, 44 nt, synthetic construct
  source 1..44: mol_type = other RNA
gggtcccccgactctggctttcccccaggtatacatgtttctgg

SEQ ID NO: 33491 - RNA, 44 nt, synthetic construct
  source 1..44: mol_type = other RNA
gggtcccccgactctggctttcccccaggtgtacatgttcctgg

SEQ ID NO: 33492 - RNA, 44 nt, synthetic construct
  source 1..44: mol_type = other RNA
gggtcccccgactctggctttcccccaggtctacatgtttctgg

SEQ ID NO: 33493 - RNA, 45 nt, synthetic construct
  source 1..45: mol_type = other RNA
ggggtcccccgactctggctttcccccaggtttacatgttcctgg

SEQ ID NO: 33494 - RNA, 45 nt, synthetic construct
  source 1..45: mol_type = other RNA
ggggtcccccgactctggctttcccccaggtttacatgtttctgg

SEQ ID NO: 33495 - RNA, 45 nt, synthetic construct
  source 1..45: mol_type = other RNA
ggggtcccccgactctggctttcccccaggtatacatgttcctgg

SEQ ID NO: 33496 - RNA, 45 nt, synthetic construct
  source 1..45: mol_type = other RNA
ggggtcccccgactctggctttcccccaggtatacatgtttctgg

SEQ ID NO: 33497 - RNA, 45 nt, synthetic construct
  source 1..45: mol_type = other RNA
ggggtcccccgactctggctttcccccaggtctacatgttcctgg

SEQ ID NO: 33498 - RNA, 45 nt, synthetic construct
  source 1..45: mol_type = other RNA
ggggtcccccgactctggctttcccccaggtctacatgtttctgg

SEQ ID NO: 33499 - RNA, 45 nt, synthetic construct
  source 1..45: mol_type = other RNA
ggggtcccccgactctggctttcccccaggtgtacatgttcctgg

SEQ ID NO: 33500 - RNA, 45 nt, synthetic construct
  source 1..45: mol_type = other RNA
ggggtcccccgactctggctttcccccaggtgtacatgtttctgg

SEQ ID NO: 33501 - RNA, 46 nt, synthetic construct
  source 1..46: mol_type = other RNA
tggggtcccccgactctggctttcccccaggtctacatgtttctgg

SEQ ID NO: 33502 - RNA, 46 nt, synthetic construct
  source 1..46: mol_type = other RNA
tggggtcccccgactctggctttcccccaggtgtacatgttcctgg

SEQ ID NO: 33503 - RNA, 46 nt, synthetic construct
  source 1..46: mol_type = other RNA
tggggtcccccgactctggctttcccccaggtatacatgttcctgg

SEQ ID NO: 33504 - RNA, 46 nt, synthetic construct
  source 1..46: mol_type = other RNA
tggggtcccccgactctggctttcccccaggtctacatgttcctgg

SEQ ID NO: 33505 - RNA, 46 nt, synthetic construct
  source 1..46: mol_type = other RNA
tggggtcccccgactctggctttcccccaggtttacatgttcctgg

SEQ ID NO: 33506 - RNA, 46 nt, synthetic construct
  source 1..46: mol_type = other RNA
tggggtcccccgactctggctttcccccaggtttacatgtttctgg

SEQ ID NO: 33507 - RNA, 46 nt, synthetic construct
  source 1..46: mol_type = other RNA
tggggtcccccgactctggctttcccccaggtatacatgtttctgg

SEQ ID NO: 33508 - RNA, 46 nt, synthetic construct
  source 1..46: mol_type = other RNA
tggggtcccccgactctggctttcccccaggtgtacatgtttctgg

SEQ ID NO: 33509 - RNA, 47 nt, synthetic construct
  source 1..47: mol_type = other RNA
atggggtcccccgactctggctttcccccaggtgtacatgttcctgg

SEQ ID NO: 33510 - RNA, 47 nt, synthetic construct
  source 1..47: mol_type = other RNA
atggggtcccccgactctggctttcccccaggtatacatgttcctgg

SEQ ID NO: 33511 - RNA, 47 nt, synthetic construct
  source 1..47: mol_type = other RNA
atggggtcccccgactctggctttcccccaggtatacatgtttctgg

SEQ ID NO: 33512 - RNA, 47 nt, synthetic construct
  source 1..47: mol_type = other RNA
atggggtcccccgactctggctttcccccaggtctacatgttcctgg

SEQ ID NO: 33513 - RNA, 47 nt, synthetic construct
  source 1..47: mol_type = other RNA
atggggtcccccgactctggctttcccccaggtgtacatgtttctgg

SEQ ID NO: 33514 - RNA, 47 nt, synthetic construct
  source 1..47: mol_type = other RNA
atggggtcccccgactctggctttcccccaggtttacatgttcctgg

SEQ ID NO: 33515 - RNA, 47 nt, synthetic construct
  source 1..47: mol_type = other RNA
atggggtcccccgactctggctttcccccaggtttacatgtttctgg

SEQ ID NO: 33516 - RNA, 47 nt, synthetic construct
  source 1..47: mol_type = other RNA
atggggtcccccgactctggctttcccccaggtctacatgtttctgg

SEQ ID NO: 33517 - RNA, 48 nt, synthetic construct
  source 1..48: mol_type = other RNA
aatggggtcccccgactctggctttcccccaggtgtacatgttcctgg

SEQ ID NO: 33518 - RNA, 48 nt, synthetic construct
  source 1..48: mol_type = other RNA
aatggggtcccccgactctggctttcccccaggtatacatgtttctgg

SEQ ID NO: 33519 - RNA, 48 nt, synthetic construct
  source 1..48: mol_type = other RNA
aatggggtcccccgactctggctttcccccaggtctacatgttcctgg

SEQ ID NO: 33520 - RNA, 48 nt, synthetic construct
  source 1..48: mol_type = other RNA
aatggggtcccccgactctggctttcccccaggtatacatgttcctgg

SEQ ID NO: 33521 - RNA, 48 nt, synthetic construct
  source 1..48: mol_type = other RNA
aatggggtcccccgactctggctttcccccaggtttacatgtttctgg

SEQ ID NO: 33522 - RNA, 48 nt, synthetic construct
  source 1..48: mol_type = other RNA
aatggggtcccccgactctggctttcccccaggtttacatgttcctgg

SEQ ID NO: 33523 - RNA, 48 nt, synthetic construct
  source 1..48: mol_type = other RNA
aatggggtcccccgactctggctttcccccaggtgtacatgtttctgg

SEQ ID NO: 33524 - RNA, 48 nt, synthetic construct
  source 1..48: mol_type = other RNA
aatggggtcccccgactctggctttcccccaggtctacatgtttctgg

SEQ ID NO: 33525 - RNA, 49 nt, synthetic construct
  source 1..49: mol_type = other RNA
gaatggggtcccccgactctggctttcccccaggtttacatgtttctgg

SEQ ID NO: 33526 - RNA, 49 nt, synthetic construct
  source 1..49: mol_type = other RNA
gaatggggtcccccgactctggctttcccccaggtgtacatgtttctgg

SEQ ID NO: 33527 - RNA, 49 nt, synthetic construct
  source 1..49: mol_type = other RNA
gaatggggtcccccgactctggctttcccccaggtttacatgttcctgg

SEQ ID NO: 33528 - RNA, 49 nt, synthetic construct
  source 1..49: mol_type = other RNA
gaatggggtcccccgactctggctttcccccaggtgtacatgttcctgg

SEQ ID NO: 33529 - RNA, 49 nt, synthetic construct
  source 1..49: mol_type = other RNA
gaatggggtcccccgactctggctttcccccaggtatacatgtttctgg

SEQ ID NO: 33530 - RNA, 49 nt, synthetic construct
  source 1..49: mol_type = other RNA
gaatggggtcccccgactctggctttcccccaggtctacatgttcctgg

SEQ ID NO: 33531 - RNA, 49 nt, synthetic construct
  source 1..49: mol_type = other RNA
gaatggggtcccccgactctggctttcccccaggtatacatgttcctgg

SEQ ID NO: 33532 - RNA, 49 nt, synthetic construct
  source 1..49: mol_type = other RNA
gaatggggtcccccgactctggctttcccccaggtctacatgtttctgg

SEQ ID NO: 33533 - RNA, 50 nt, synthetic construct
  source 1..50: mol_type = other RNA
tgaatggggtcccccgactctggctttcccccaggtatacatgtttctgg

SEQ ID NO: 33534 - RNA, 50 nt, synthetic construct
  source 1..50: mol_type = other RNA
tgaatggggtcccccgactctggctttcccccaggtctacatgttcctgg

SEQ ID NO: 33535 - RNA, 50 nt, synthetic construct
  source 1..50: mol_type = other RNA
tgaatggggtcccccgactctggctttcccccaggtctacatgtttctgg

SEQ ID NO: 33536 - RNA, 50 nt, synthetic construct
  source 1..50: mol_type = other RNA
tgaatggggtcccccgactctggctttcccccaggtgtacatgttcctgg

SEQ ID NO: 33537 - RNA, 50 nt, synthetic construct
  source 1..50: mol_type = other RNA
tgaatggggtcccccgactctggctttcccccaggtgtacatgtttctgg

SEQ ID NO: 33538 - RNA, 50 nt, synthetic construct
  source 1..50: mol_type = other RNA
tgaatggggtcccccgactctggctttcccccaggtttacatgttcctgg

SEQ ID NO: 33539 - RNA, 50 nt, synthetic construct
  source 1..50: mol_type = other RNA
tgaatggggtcccccgactctggctttcccccaggtttacatgtttctgg

SEQ ID NO: 33540 - RNA, 50 nt, synthetic construct
  source 1..50: mol_type = other RNA
tgaatggggtcccccgactctggctttcccccaggtatacatgttcctgg

SEQ ID NO: 33541 - RNA, 51 nt, synthetic construct
  source 1..51: mol_type = other RNA
ctgaatggggtcccccgactctggctttcccccaggtatacatgtttctgg

SEQ ID NO: 33542 - RNA, 51 nt, synthetic construct
  source 1..51: mol_type = other RNA
ctgaatggggtcccccgactctggctttcccccaggtctacatgttcctgg

SEQ ID NO: 33543 - RNA, 51 nt, synthetic construct
  source 1..51: mol_type = other RNA
ctgaatggggtcccccgactctggctttcccccaggtgtacatgtttctgg

SEQ ID NO: 33544 - RNA, 51 nt, synthetic construct
  source 1..51: mol_type = other RNA
ctgaatggggtcccccgactctggctttcccccaggtatacatgttcctgg

SEQ ID NO: 33545 - RNA, 51 nt, synthetic construct
  source 1..51: mol_type = other RNA
ctgaatggggtcccccgactctggctttcccccaggtctacatgtttctgg

SEQ ID NO: 33546 - RNA, 51 nt, synthetic construct
  source 1..51: mol_type = other RNA
ctgaatggggtcccccgactctggctttcccccaggtttacatgttcctgg

SEQ ID NO: 33547 - RNA, 51 nt, synthetic construct
  source 1..51: mol_type = other RNA
ctgaatggggtcccccgactctggctttcccccaggtgtacatgttcctgg

SEQ ID NO: 33548 - RNA, 51 nt, synthetic construct
  source 1..51: mol_type = other RNA
ctgaatggggtcccccgactctggctttcccccaggtttacatgtttctgg

SEQ ID NO: 33549 - RNA, 52 nt, synthetic construct
  source 1..52: mol_type = other RNA
gctgaatggggtcccccgactctggctttcccccaggtatacatgtttctgg

SEQ ID NO: 33550 - RNA, 52 nt, synthetic construct
  source 1..52: mol_type = other RNA
gctgaatggggtcccccgactctggctttcccccaggtctacatgttcctgg

SEQ ID NO: 33551 - RNA, 52 nt, synthetic construct
  source 1..52: mol_type = other RNA
gctgaatggggtcccccgactctggctttcccccaggtatacatgttcctgg

SEQ ID NO: 33552 - RNA, 52 nt, synthetic construct
  source 1..52: mol_type = other RNA
gctgaatggggtcccccgactctggctttcccccaggtgtacatgttcctgg

SEQ ID NO: 33553 - RNA, 52 nt, synthetic construct
  source 1..52: mol_type = other RNA
gctgaatggggtcccccgactctggctttcccccaggtttacatgttcctgg

SEQ ID NO: 33554 - RNA, 52 nt, synthetic construct
  source 1..52: mol_type = other RNA
gctgaatggggtcccccgactctggctttcccccaggtgtacatgtttctgg

SEQ ID NO: 33555 - RNA, 52 nt, synthetic construct
  source 1..52: mol_type = other RNA
gctgaatggggtcccccgactctggctttcccccaggtttacatgtttctgg

SEQ ID NO: 33556 - RNA, 52 nt, synthetic construct
  source 1..52: mol_type = other RNA
gctgaatggggtcccccgactctggctttcccccaggtctacatgtttctgg

SEQ ID NO: 33557 - RNA, 53 nt, synthetic construct
  source 1..53: mol_type = other RNA
ggctgaatggggtcccccgactctggctttcccccaggtctacatgttcctgg

SEQ ID NO: 33558 - RNA, 53 nt, synthetic construct
  source 1..53: mol_type = other RNA
ggctgaatggggtcccccgactctggctttcccccaggtatacatgttcctgg

SEQ ID NO: 33559 - RNA, 53 nt, synthetic construct
  source 1..53: mol_type = other RNA
ggctgaatggggtcccccgactctggctttcccccaggtatacatgtttctgg

SEQ ID NO: 33560 - RNA, 53 nt, synthetic construct
  source 1..53: mol_type = other RNA
ggctgaatggggtcccccgactctggctttcccccaggtgtacatgtttctgg

SEQ ID NO: 33561 - RNA, 53 nt, synthetic construct
  source 1..53: mol_type = other RNA
ggctgaatggggtcccccgactctggctttcccccaggtctacatgtttctgg

SEQ ID NO: 33562 - RNA, 53 nt, synthetic construct
  source 1..53: mol_type = other RNA
ggctgaatggggtcccccgactctggctttcccccaggtgtacatgttcctgg

SEQ ID NO: 33563 - RNA, 53 nt, synthetic construct
  source 1..53: mol_type = other RNA
ggctgaatggggtcccccgactctggctttcccccaggtttacatgtttctgg

SEQ ID NO: 33564 - RNA, 53 nt, synthetic construct
  source 1..53: mol_type = other RNA
ggctgaatggggtcccccgactctggctttcccccaggtttacatgttcctgg

SEQ ID NO: 33565 - RNA, 54 nt, synthetic construct
  source 1..54: mol_type = other RNA
aggctgaatggggtcccccgactctggctttcccccaggtttacatgtttctgg

SEQ ID NO: 33566 - RNA, 54 nt, synthetic construct
  source 1..54: mol_type = other RNA
aggctgaatggggtcccccgactctggctttcccccaggtttacatgttcctgg

SEQ ID NO: 33567 - RNA, 54 nt, synthetic construct
  source 1..54: mol_type = other RNA
aggctgaatggggtcccccgactctggctttcccccaggtgtacatgttcctgg

SEQ ID NO: 33568 - RNA, 54 nt, synthetic construct
  source 1..54: mol_type = other RNA
aggctgaatggggtcccccgactctggctttcccccaggtgtacatgtttctgg

SEQ ID NO: 33569 - RNA, 54 nt, synthetic construct
  source 1..54: mol_type = other RNA
aggctgaatggggtcccccgactctggctttcccccaggtctacatgttcctgg

SEQ ID NO: 33570 - RNA, 54 nt, synthetic construct
  source 1..54: mol_type = other RNA
aggctgaatggggtcccccgactctggctttcccccaggtatacatgttcctgg

SEQ ID NO: 33571 - RNA, 54 nt, synthetic construct
  source 1..54: mol_type = other RNA
aggctgaatggggtcccccgactctggctttcccccaggtatacatgtttctgg

SEQ ID NO: 33572 - RNA, 54 nt, synthetic construct
  source 1..54: mol_type = other RNA
aggctgaatggggtcccccgactctggctttcccccaggtctacatgtttctgg

SEQ ID NO: 33573 - RNA, 55 nt, synthetic construct
  source 1..55: mol_type = other RNA
gaggctgaatggggtcccccgactctggctttcccccaggtctacatgtttctgg

SEQ ID NO: 33574 - RNA, 55 nt, synthetic construct
  source 1..55: mol_type = other RNA
gaggctgaatggggtcccccgactctggctttcccccaggtatacatgttcctgg

SEQ ID NO: 33575 - RNA, 55 nt, synthetic construct
  source 1..55: mol_type = other RNA
gaggctgaatggggtcccccgactctggctttcccccaggtatacatgtttctgg

SEQ ID NO: 33576 - RNA, 55 nt, synthetic construct
  source 1..55: mol_type = other RNA
gaggctgaatggggtcccccgactctggctttcccccaggtctacatgttcctgg

SEQ ID NO: 33577 - RNA, 55 nt, synthetic construct
  source 1..55: mol_type = other RNA
gaggctgaatggggtcccccgactctggctttcccccaggtgtacatgttcctgg

SEQ ID NO: 33578 - RNA, 55 nt, synthetic construct
  source 1..55: mol_type = other RNA
gaggctgaatggggtcccccgactctggctttcccccaggtttacatgttcctgg

SEQ ID NO: 33579 - RNA, 55 nt, synthetic construct
  source 1..55: mol_type = other RNA
gaggctgaatggggtcccccgactctggctttcccccaggtttacatgtttctgg

SEQ ID NO: 33580 - RNA, 55 nt, synthetic construct
  source 1..55: mol_type = other RNA
gaggctgaatggggtcccccgactctggctttcccccaggtgtacatgtttctgg

SEQ ID NO: 33581 - RNA, 56 nt, synthetic construct
  source 1..56: mol_type = other RNA
ggaggctgaatggggtcccccgactctggctttcccccaggtctacatgtttctgg

SEQ ID NO: 33582 - RNA, 56 nt, synthetic construct
  source 1..56: mol_type = other RNA
ggaggctgaatggggtcccccgactctggctttcccccaggtttacatgttcctgg

SEQ ID NO: 33583 - RNA, 56 nt, synthetic construct
  source 1..56: mol_type = other RNA
ggaggctgaatggggtcccccgactctggctttcccccaggtatacatgtttctgg

SEQ ID NO: 33584 - RNA, 56 nt, synthetic construct
  source 1..56: mol_type = other RNA
ggaggctgaatggggtcccccgactctggctttcccccaggtatacatgttcctgg

SEQ ID NO: 33585 - RNA, 56 nt, synthetic construct
  source 1..56: mol_type = other RNA
ggaggctgaatggggtcccccgactctggctttcccccaggtctacatgttcctgg

SEQ ID NO: 33586 - RNA, 56 nt, synthetic construct
  source 1..56: mol_type = other RNA
ggaggctgaatggggtcccccgactctggctttcccccaggtgtacatgtttctgg

SEQ ID NO: 33587 - RNA, 56 nt, synthetic construct
  source 1..56: mol_type = other RNA
ggaggctgaatggggtcccccgactctggctttcccccaggtttacatgtttctgg

SEQ ID NO: 33588 - RNA, 56 nt, synthetic construct
  source 1..56: mol_type = other RNA
ggaggctgaatggggtcccccgactctggctttcccccaggtgtacatgttcctgg

SEQ ID NO: 33589 - RNA, 57 nt, synthetic construct
  source 1..57: mol_type = other RNA
tggaggctgaatggggtcccccgactctggctttcccccaggtctacatgttcctgg

SEQ ID NO: 33590 - RNA, 57 nt, synthetic construct
  source 1..57: mol_type = other RNA
tggaggctgaatggggtcccccgactctggctttcccccaggtatacatgtttctgg

SEQ ID NO: 33591 - RNA, 57 nt, synthetic construct
  source 1..57: mol_type = other RNA
tggaggctgaatggggtcccccgactctggctttcccccaggtatacatgttcctgg

SEQ ID NO: 33592 - RNA, 57 nt, synthetic construct
  source 1..57: mol_type = other RNA
tggaggctgaatggggtcccccgactctggctttcccccaggtttacatgttcctgg

SEQ ID NO: 33593 - RNA, 57 nt, synthetic construct
  source 1..57: mol_type = other RNA
tggaggctgaatggggtcccccgactctggctttcccccaggtgtacatgtttctgg

SEQ ID NO: 33594 - RNA, 57 nt, synthetic construct
  source 1..57: mol_type = other RNA
tggaggctgaatggggtcccccgactctggctttcccccaggtgtacatgttcctgg

SEQ ID NO: 33595 - RNA, 57 nt, synthetic construct
  source 1..57: mol_type = other RNA
tggaggctgaatggggtcccccgactctggctttcccccaggtctacatgtttctgg

SEQ ID NO: 33596 - RNA, 57 nt, synthetic construct
  source 1..57: mol_type = other RNA
tggaggctgaatggggtcccccgactctggctttcccccaggtttacatgtttctgg

SEQ ID NO: 33597 - RNA, 58 nt, synthetic construct
  source 1..58: mol_type = other RNA
ttggaggctgaatggggtcccccgactctggctttcccccaggtatacatgttcctgg

SEQ ID NO: 33598 - RNA, 58 nt, synthetic construct
  source 1..58: mol_type = other RNA
ttggaggctgaatggggtcccccgactctggctttcccccaggtatacatgtttctgg

SEQ ID NO: 33599 - RNA, 58 nt, synthetic construct
  source 1..58: mol_type = other RNA
ttggaggctgaatggggtcccccgactctggctttcccccaggtctacatgttcctgg

SEQ ID NO: 33600 - RNA, 58 nt, synthetic construct
  source 1..58: mol_type = other RNA
ttggaggctgaatggggtcccccgactctggctttcccccaggtctacatgtttctgg

SEQ ID NO: 33601 - RNA, 58 nt, synthetic construct
  source 1..58: mol_type = other RNA
ttggaggctgaatggggtcccccgactctggctttcccccaggtgtacatgttcctgg

SEQ ID NO: 33602 - RNA, 58 nt, synthetic construct
  source 1..58: mol_type = other RNA
ttggaggctgaatggggtcccccgactctggctttcccccaggtgtacatgtttctgg

SEQ ID NO: 33603 - RNA, 58 nt, synthetic construct
  source 1..58: mol_type = other RNA
ttggaggctgaatggggtcccccgactctggctttcccccaggtttacatgttcctgg

SEQ ID NO: 33604 - RNA, 58 nt, synthetic construct
  source 1..58: mol_type = other RNA
ttggaggctgaatggggtcccccgactctggctttcccccaggtttacatgtttctgg

SEQ ID NO: 33605 - RNA, 59 nt, synthetic construct
  source 1..59: mol_type = other RNA
tttggaggctgaatggggtcccccgactctggctttcccccaggtttacatgttcctgg

SEQ ID NO: 33606 - RNA, 59 nt, synthetic construct
  source 1..59: mol_type = other RNA
tttggaggctgaatggggtcccccgactctggctttcccccaggtttacatgtttctgg

SEQ ID NO: 33607 - RNA, 59 nt, synthetic construct
  source 1..59: mol_type = other RNA
tttggaggctgaatggggtcccccgactctggctttcccccaggtgtacatgttcctgg

SEQ ID NO: 33608 - RNA, 59 nt, synthetic construct
  source 1..59: mol_type = other RNA
tttggaggctgaatggggtcccccgactctggctttcccccaggtgtacatgtttctgg

SEQ ID NO: 33609 - RNA, 59 nt, synthetic construct
  source 1..59: mol_type = other RNA
tttggaggctgaatggggtcccccgactctggctttcccccaggtctacatgttcctgg

SEQ ID NO: 33610 - RNA, 59 nt, synthetic construct
  source 1..59: mol_type = other RNA
tttggaggctgaatggggtcccccgactctggctttcccccaggtatacatgtttctgg

SEQ ID NO: 33611 - RNA, 59 nt, synthetic construct
  source 1..59: mol_type = other RNA
tttggaggctgaatggggtcccccgactctggctttcccccaggtctacatgtttctgg

SEQ ID NO: 33612 - RNA, 59 nt, synthetic construct
  source 1..59: mol_type = other RNA
tttggaggctgaatggggtcccccgactctggctttcccccaggtatacatgttcctgg

SEQ ID NO: 33613 - RNA, 60 nt, synthetic construct
  source 1..60: mol_type = other RNA
ctttggaggctgaatggggtcccccgactctggctttcccccaggtatacatgtttctgg

SEQ ID NO: 33614 - RNA, 60 nt, synthetic construct
  source 1..60: mol_type = other RNA
ctttggaggctgaatggggtcccccgactctggctttcccccaggtctacatgtttctgg

SEQ ID NO: 33615 - RNA, 60 nt, synthetic construct
  source 1..60: mol_type = other RNA
ctttggaggctgaatggggtcccccgactctggctttcccccaggtttacatgtttctgg

SEQ ID NO: 33616 - RNA, 60 nt, synthetic construct
  source 1..60: mol_type = other RNA
ctttggaggctgaatggggtcccccgactctggctttcccccaggtgtacatgttcctgg

SEQ ID NO: 33617 - RNA, 60 nt, synthetic construct
  source 1..60: mol_type = other RNA
ctttggaggctgaatggggtcccccgactctggctttcccccaggtgtacatgtttctgg

SEQ ID NO: 33618 - RNA, 60 nt, synthetic construct
  source 1..60: mol_type = other RNA
ctttggaggctgaatggggtcccccgactctggctttcccccaggtttacatgttcctgg

SEQ ID NO: 33619 - RNA, 60 nt, synthetic construct
  source 1..60: mol_type = other RNA
ctttggaggctgaatggggtcccccgactctggctttcccccaggtctacatgttcctgg

SEQ ID NO: 33620 - RNA, 60 nt, synthetic construct
  source 1..60: mol_type = other RNA
ctttggaggctgaatggggtcccccgactctggctttcccccaggtatacatgttcctgg

SEQ ID NO: 33621 - RNA, 61 nt, synthetic construct
  source 1..61: mol_type = other RNA
tctttggaggctgaatggggtcccccgactctggctttcccccaggtatacatgtttctgg

SEQ ID NO: 33622 - RNA, 61 nt, synthetic construct
  source 1..61: mol_type = other RNA
tctttggaggctgaatggggtcccccgactctggctttcccccaggtttacatgtttctgg

SEQ ID NO: 33623 - RNA, 61 nt, synthetic construct
  source 1..61: mol_type = other RNA
tctttggaggctgaatggggtcccccgactctggctttcccccaggtatacatgttcctgg

SEQ ID NO: 33624 - RNA, 61 nt, synthetic construct
  source 1..61: mol_type = other RNA
tctttggaggctgaatggggtcccccgactctggctttcccccaggtctacatgttcctgg

SEQ ID NO: 33625 - RNA, 61 nt, synthetic construct
  source 1..61: mol_type = other RNA
tctttggaggctgaatggggtcccccgactctggctttcccccaggtctacatgtttctgg

SEQ ID NO: 33626 - RNA, 61 nt, synthetic construct
  source 1..61: mol_type = other RNA
tctttggaggctgaatggggtcccccgactctggctttcccccaggtgtacatgttcctgg

SEQ ID NO: 33627 - RNA, 61 nt, synthetic construct
  source 1..61: mol_type = other RNA
tctttggaggctgaatggggtcccccgactctggctttcccccaggtgtacatgtttctgg

SEQ ID NO: 33628 - RNA, 61 nt, synthetic construct
  source 1..61: mol_type = other RNA
tctttggaggctgaatggggtcccccgactctggctttcccccaggtttacatgttcctgg

SEQ ID NO: 33629 - RNA, 62 nt, synthetic construct
  source 1..62: mol_type = other RNA
ctctttggaggctgaatggggtcccccgactctggctttcccccaggtatacatgttcctgg

SEQ ID NO: 33630 - RNA, 62 nt, synthetic construct
  source 1..62: mol_type = other RNA
ctctttggaggctgaatggggtcccccgactctggctttcccccaggtttacatgtttctgg

SEQ ID NO: 33631 - RNA, 62 nt, synthetic construct
  source 1..62: mol_type = other RNA
ctctttggaggctgaatggggtcccccgactctggctttcccccaggtttacatgttcctgg

SEQ ID NO: 33632 - RNA, 62 nt, synthetic construct
  source 1..62: mol_type = other RNA
ctctttggaggctgaatggggtcccccgactctggctttcccccaggtctacatgtttctgg

SEQ ID NO: 33633 - RNA, 62 nt, synthetic construct
  source 1..62: mol_type = other RNA
ctctttggaggctgaatggggtcccccgactctggctttcccccaggtgtacatgtttctgg

SEQ ID NO: 33634 - RNA, 62 nt, synthetic construct
  source 1..62: mol_type = other RNA
ctctttggaggctgaatggggtcccccgactctggctttcccccaggtatacatgtttctgg

SEQ ID NO: 33635 - RNA, 62 nt, synthetic construct
  source 1..62: mol_type = other RNA
ctctttggaggctgaatggggtcccccgactctggctttcccccaggtctacatgttcctgg

SEQ ID NO: 33636 - RNA, 62 nt, synthetic construct
  source 1..62: mol_type = other RNA
ctctttggaggctgaatggggtcccccgactctggctttcccccaggtgtacatgttcctgg

SEQ ID NO: 33637 - RNA, 63 nt, synthetic construct
  source 1..63: mol_type = other RNA
cctctttggaggctgaatggggtcccccgactctggctttcccccaggtctacatgttcctgg

SEQ ID NO: 33638 - RNA, 63 nt, synthetic construct
  source 1..63: mol_type = other RNA
cctctttggaggctgaatggggtcccccgactctggctttcccccaggtctacatgtttctgg

SEQ ID NO: 33639 - RNA, 63 nt, synthetic construct
  source 1..63: mol_type = other RNA
cctctttggaggctgaatggggtcccccgactctggctttcccccaggtatacatgttcctgg

SEQ ID NO: 33640 - RNA, 63 nt, synthetic construct
  source 1..63: mol_type = other RNA
cctctttggaggctgaatggggtcccccgactctggctttcccccaggtttacatgtttctgg

SEQ ID NO: 33641 - RNA, 63 nt, synthetic construct
  source 1..63: mol_type = other RNA
cctctttggaggctgaatggggtcccccgactctggctttcccccaggtgtacatgttcctgg

SEQ ID NO: 33642 - RNA, 63 nt, synthetic construct
  source 1..63: mol_type = other RNA
cctctttggaggctgaatggggtcccccgactctggctttcccccaggtgtacatgtttctgg

SEQ ID NO: 33643 - RNA, 63 nt, synthetic construct
  source 1..63: mol_type = other RNA
cctctttggaggctgaatggggtcccccgactctggctttcccccaggtttacatgttcctgg

SEQ ID NO: 33644 - RNA, 63 nt, synthetic construct
  source 1..63: mol_type = other RNA
cctctttggaggctgaatggggtcccccgactctggctttcccccaggtatacatgtttctgg

SEQ ID NO: 33645 - RNA, 64 nt, synthetic construct
  source 1..64: mol_type = other RNA
gcctctttggaggctgaatggggtcccccgactctggctttcccccaggtatacatgttcctgg

SEQ ID NO: 33646 - RNA, 64 nt, synthetic construct
  source 1..64: mol_type = other RNA
gcctctttggaggctgaatggggtcccccgactctggctttcccccaggtatacatgtttctgg

SEQ ID NO: 33647 - RNA, 64 nt, synthetic construct
  source 1..64: mol_type = other RNA
gcctctttggaggctgaatggggtcccccgactctggctttcccccaggtctacatgttcctgg

SEQ ID NO: 33648 - RNA, 64 nt, synthetic construct
  source 1..64: mol_type = other RNA
gcctctttggaggctgaatggggtcccccgactctggctttcccccaggtgtacatgtttctgg

SEQ ID NO: 33649 - RNA, 64 nt, synthetic construct
  source 1..64: mol_type = other RNA
gcctctttggaggctgaatggggtcccccgactctggctttcccccaggtgtacatgttcctgg

SEQ ID NO: 33650 - RNA, 64 nt, synthetic construct
  source 1..64: mol_type = other RNA
gcctctttggaggctgaatggggtcccccgactctggctttcccccaggtttacatgtttctgg

SEQ ID NO: 33651 - RNA, 64 nt, synthetic construct
  source 1..64: mol_type = other RNA
gcctctttggaggctgaatggggtcccccgactctggctttcccccaggtctacatgtttctgg

SEQ ID NO: 33652 - RNA, 64 nt, synthetic construct
  source 1..64: mol_type = other RNA
gcctctttggaggctgaatggggtcccccgactctggctttcccccaggtttacatgttcctgg

SEQ ID NO: 33653 - RNA, 65 nt, synthetic construct
  source 1..65: mol_type = other RNA
agcctctttggaggctgaatggggtcccccgactctggctttcccccaggtttacatgttcctgg

SEQ ID NO: 33654 - RNA, 65 nt, synthetic construct
  source 1..65: mol_type = other RNA
agcctctttggaggctgaatggggtcccccgactctggctttcccccaggtttacatgtttctgg

SEQ ID NO: 33655 - RNA, 65 nt, synthetic construct
  source 1..65: mol_type = other RNA
agcctctttggaggctgaatggggtcccccgactctggctttcccccaggtgtacatgtttctgg

SEQ ID NO: 33656 - RNA, 65 nt, synthetic construct
  source 1..65: mol_type = other RNA
agcctctttggaggctgaatggggtcccccgactctggctttcccccaggtctacatgtttctgg

SEQ ID NO: 33657 - RNA, 65 nt, synthetic construct
  source 1..65: mol_type = other RNA
agcctctttggaggctgaatggggtcccccgactctggctttcccccaggtctacatgttcctgg

SEQ ID NO: 33658 - RNA, 65 nt, synthetic construct
  source 1..65: mol_type = other RNA
agcctctttggaggctgaatggggtcccccgactctggctttcccccaggtatacatgttcctgg

SEQ ID NO: 33659 - RNA, 65 nt, synthetic construct
  source 1..65: mol_type = other RNA
agcctctttggaggctgaatggggtcccccgactctggctttcccccaggtatacatgtttctgg

SEQ ID NO: 33660 - RNA, 65 nt, synthetic construct
  source 1..65: mol_type = other RNA
agcctctttggaggctgaatggggtcccccgactctggctttcccccaggtgtacatgttcctgg

SEQ ID NO: 33661 - RNA, 66 nt, synthetic construct
  source 1..66: mol_type = other RNA
aagcctctttggaggctgaatggggtcccccgactctggctttcccccaggtctacatgttcctgg

SEQ ID NO: 33662 - RNA, 66 nt, synthetic construct
  source 1..66: mol_type = other RNA
aagcctctttggaggctgaatggggtcccccgactctggctttcccccaggtatacatgttcctgg

SEQ ID NO: 33663 - RNA, 66 nt, synthetic construct
  source 1..66: mol_type = other RNA
aagcctctttggaggctgaatggggtcccccgactctggctttcccccaggtatacatgtttctgg

SEQ ID NO: 33664 - RNA, 66 nt, synthetic construct
  source 1..66: mol_type = other RNA
aagcctctttggaggctgaatggggtcccccgactctggctttcccccaggtctacatgtttctgg

SEQ ID NO: 33665 - RNA, 66 nt, synthetic construct
  source 1..66: mol_type = other RNA
aagcctctttggaggctgaatggggtcccccgactctggctttcccccaggtgtacatgttcctgg

SEQ ID NO: 33666 - RNA, 66 nt, synthetic construct
  source 1..66: mol_type = other RNA
aagcctctttggaggctgaatggggtcccccgactctggctttcccccaggtgtacatgtttctgg

SEQ ID NO: 33667 - RNA, 66 nt, synthetic construct
  source 1..66: mol_type = other RNA
aagcctctttggaggctgaatggggtcccccgactctggctttcccccaggtttacatgttcctgg

SEQ ID NO: 33668 - RNA, 66 nt, synthetic construct
  source 1..66: mol_type = other RNA
aagcctctttggaggctgaatggggtcccccgactctggctttcccccaggtttacatgtttctgg

SEQ ID NO: 33669 - RNA, 67 nt, synthetic construct
  source 1..67: mol_type = other RNA
aaagcctctttggaggctgaatggggtcccccgactctggctttcccccaggtatacatgttcctgg

SEQ ID NO: 33670 - RNA, 67 nt, synthetic construct
  source 1..67: mol_type = other RNA
aaagcctctttggaggctgaatggggtcccccgactctggctttcccccaggtttacatgttcctgg

SEQ ID NO: 33671 - RNA, 67 nt, synthetic construct
  source 1..67: mol_type = other RNA
aaagcctctttggaggctgaatggggtcccccgactctggctttcccccaggtttacatgtttctgg

SEQ ID NO: 33672 - RNA, 67 nt, synthetic construct
  source 1..67: mol_type = other RNA
aaagcctctttggaggctgaatggggtcccccgactctggctttcccccaggtatacatgtttctgg

SEQ ID NO: 33673 - RNA, 67 nt, synthetic construct
  source 1..67: mol_type = other RNA
aaagcctctttggaggctgaatggggtcccccgactctggctttcccccaggtctacatgttcctgg

SEQ ID NO: 33674 - RNA, 67 nt, synthetic construct
  source 1..67: mol_type = other RNA
aaagcctctttggaggctgaatggggtcccccgactctggctttcccccaggtgtacatgttcctgg

SEQ ID NO: 33675 - RNA, 67 nt, synthetic construct
  source 1..67: mol_type = other RNA
aaagcctctttggaggctgaatggggtcccccgactctggctttcccccaggtctacatgtttctgg

SEQ ID NO: 33676 - RNA, 67 nt, synthetic construct
  source 1..67: mol_type = other RNA
aaagcctctttggaggctgaatggggtcccccgactctggctttcccccaggtgtacatgtttctgg

SEQ ID NO: 33677 - RNA, 68 nt, synthetic construct
  source 1..68: mol_type = other RNA
caaagcctctttggaggctgaatggggtcccccgactctggctttcccccaggtatacatgtttctgg

SEQ ID NO: 33678 - RNA, 68 nt, synthetic construct
  source 1..68: mol_type = other RNA
caaagcctctttggaggctgaatggggtcccccgactctggctttcccccaggtctacatgtttctgg

SEQ ID NO: 33679 - RNA, 68 nt, synthetic construct
  source 1..68: mol_type = other RNA
caaagcctctttggaggctgaatggggtcccccgactctggctttcccccaggtctacatgttcctgg

SEQ ID NO: 33680 - RNA, 68 nt, synthetic construct
  source 1..68: mol_type = other RNA
caaagcctctttggaggctgaatggggtcccccgactctggctttcccccaggtgtacatgtttctgg

SEQ ID NO: 33681 - RNA, 68 nt, synthetic construct
  source 1..68: mol_type = other RNA
caaagcctctttggaggctgaatggggtcccccgactctggctttcccccaggtttacatgttcctgg

SEQ ID NO: 33682 - RNA, 68 nt, synthetic construct
  source 1..68: mol_type = other RNA
caaagcctctttggaggctgaatggggtcccccgactctggctttcccccaggtgtacatgttcctgg

SEQ ID NO: 33683 - RNA, 68 nt, synthetic construct
  source 1..68: mol_type = other RNA
caaagcctctttggaggctgaatggggtcccccgactctggctttcccccaggtatacatgttcctgg

SEQ ID NO: 33684 - RNA, 68 nt, synthetic construct
  source 1..68: mol_type = other RNA
caaagcctctttggaggctgaatggggtcccccgactctggctttcccccaggtttacatgtttctgg

SEQ ID NO: 33685 - RNA, 69 nt, synthetic construct
  source 1..69: mol_type = other RNA
gcaaagcctctttggaggctgaatggggtcccccgactctggctttcccccaggtttacatgtttctgg

SEQ ID NO: 33686 - RNA, 69 nt, synthetic construct
  source 1..69: mol_type = other RNA
gcaaagcctctttggaggctgaatggggtcccccgactctggctttcccccaggtctacatgttcctgg

SEQ ID NO: 33687 - RNA, 69 nt, synthetic construct
  source 1..69: mol_type = other RNA
gcaaagcctctttggaggctgaatggggtcccccgactctggctttcccccaggtatacatgttcctgg

SEQ ID NO: 33688 - RNA, 69 nt, synthetic construct
  source 1..69: mol_type = other RNA
gcaaagcctctttggaggctgaatggggtcccccgactctggctttcccccaggtatacatgtttctgg

SEQ ID NO: 33689 - RNA, 69 nt, synthetic construct
  source 1..69: mol_type = other RNA
gcaaagcctctttggaggctgaatggggtcccccgactctggctttcccccaggtctacatgtttctgg

SEQ ID NO: 33690 - RNA, 69 nt, synthetic construct
  source 1..69: mol_type = other RNA
gcaaagcctctttggaggctgaatggggtcccccgactctggctttcccccaggtgtacatgttcctgg

SEQ ID NO: 33691 - RNA, 69 nt, synthetic construct
  source 1..69: mol_type = other RNA
gcaaagcctctttggaggctgaatggggtcccccgactctggctttcccccaggtgtacatgtttctgg

SEQ ID NO: 33692 - RNA, 69 nt, synthetic construct
  source 1..69: mol_type = other RNA
gcaaagcctctttggaggctgaatggggtcccccgactctggctttcccccaggtttacatgttcctgg

SEQ ID NO: 33693 - RNA, 70 nt, synthetic construct
  source 1..70: mol_type = other RNA
agcaaagcctctttggaggctgaatggggtcccccgactctggctttcccccaggtttacatgtttctgg

SEQ ID NO: 33694 - RNA, 70 nt, synthetic construct
  source 1..70: mol_type = other RNA
agcaaagcctctttggaggctgaatggggtcccccgactctggctttcccccaggtatacatgttcctgg

SEQ ID NO: 33695 - RNA, 70 nt, synthetic construct
  source 1..70: mol_type = other RNA
agcaaagcctctttggaggctgaatggggtcccccgactctggctttcccccaggtatacatgtttctgg

SEQ ID NO: 33696 - RNA, 70 nt, synthetic construct
  source 1..70: mol_type = other RNA
agcaaagcctctttggaggctgaatggggtcccccgactctggctttcccccaggtctacatgttcctgg

SEQ ID NO: 33697 - RNA, 70 nt, synthetic construct
  source 1..70: mol_type = other RNA
agcaaagcctctttggaggctgaatggggtcccccgactctggctttcccccaggtgtacatgtttctgg

SEQ ID NO: 33698 - RNA, 70 nt, synthetic construct
  source 1..70: mol_type = other RNA
agcaaagcctctttggaggctgaatggggtcccccgactctggctttcccccaggtttacatgttcctgg

SEQ ID NO: 33699 - RNA, 70 nt, synthetic construct
  source 1..70: mol_type = other RNA
agcaaagcctctttggaggctgaatggggtcccccgactctggctttcccccaggtgtacatgttcctgg

SEQ ID NO: 33700 - RNA, 70 nt, synthetic construct
  source 1..70: mol_type = other RNA
agcaaagcctctttggaggctgaatggggtcccccgactctggctttcccccaggtctacatgtttctgg

SEQ ID NO: 33701 - RNA, 71 nt, synthetic construct
  source 1..71: mol_type = other RNA
cagcaaagcctctttggaggctgaatggggtcccccgactctggctttcccccaggtctacatgttcctgg

SEQ ID NO: 33702 - RNA, 71 nt, synthetic construct
  source 1..71: mol_type = other RNA
cagcaaagcctctttggaggctgaatggggtcccccgactctggctttcccccaggtatacatgttcctgg

SEQ ID NO: 33703 - RNA, 71 nt, synthetic construct
  source 1..71: mol_type = other RNA
cagcaaagcctctttggaggctgaatggggtcccccgactctggctttcccccaggtatacatgtttctgg

SEQ ID NO: 33704 - RNA, 71 nt, synthetic construct
  source 1..71: mol_type = other RNA
cagcaaagcctctttggaggctgaatggggtcccccgactctggctttcccccaggtttacatgtttctgg

SEQ ID NO: 33705 - RNA, 71 nt, synthetic construct
  source 1..71: mol_type = other RNA
cagcaaagcctctttggaggctgaatggggtcccccgactctggctttcccccaggtgtacatgtttctgg

SEQ ID NO: 33706 - RNA, 71 nt, synthetic construct
  source 1..71: mol_type = other RNA
cagcaaagcctctttggaggctgaatggggtcccccgactctggctttcccccaggtctacatgtttctgg

SEQ ID NO: 33707 - RNA, 71 nt, synthetic construct
  source 1..71: mol_type = other RNA
cagcaaagcctctttggaggctgaatggggtcccccgactctggctttcccccaggtgtacatgttcctgg

SEQ ID NO: 33708 - RNA, 71 nt, synthetic construct
  source 1..71: mol_type = other RNA
cagcaaagcctctttggaggctgaatggggtcccccgactctggctttcccccaggtttacatgttcctgg

SEQ ID NO: 33709 - RNA, 72 nt, synthetic construct
  source 1..72: mol_type = other RNA
acagcaaagcctctttggaggctgaatggggtcccccgactctggctttcccccaggtttacatgttcctgg

SEQ ID NO: 33710 - RNA, 72 nt, synthetic construct
  source 1..72: mol_type = other RNA
acagcaaagcctctttggaggctgaatggggtcccccgactctggctttcccccaggtctacatgtttctgg

SEQ ID NO: 33711 - RNA, 72 nt, synthetic construct
  source 1..72: mol_type = other RNA
acagcaaagcctctttggaggctgaatggggtcccccgactctggctttcccccaggtgtacatgtttctgg

SEQ ID NO: 33712 - RNA, 72 nt, synthetic construct
  source 1..72: mol_type = other RNA
acagcaaagcctctttggaggctgaatggggtcccccgactctggctttcccccaggtgtacatgttcctgg

SEQ ID NO: 33713 - RNA, 72 nt, synthetic construct
  source 1..72: mol_type = other RNA
acagcaaagcctctttggaggctgaatggggtcccccgactctggctttcccccaggtttacatgtttctgg

SEQ ID NO: 33714 - RNA, 72 nt, synthetic construct
  source 1..72: mol_type = other RNA
acagcaaagcctctttggaggctgaatggggtcccccgactctggctttcccccaggtatacatgtttctgg

SEQ ID NO: 33715 - RNA, 72 nt, synthetic construct
  source 1..72: mol_type = other RNA
acagcaaagcctctttggaggctgaatggggtcccccgactctggctttcccccaggtatacatgttcctgg

SEQ ID NO: 33716 - RNA, 72 nt, synthetic construct
  source 1..72: mol_type = other RNA
acagcaaagcctctttggaggctgaatggggtcccccgactctggctttcccccaggtctacatgttcctgg

SEQ ID NO: 33717 - RNA, 73 nt, synthetic construct
  source 1..73: mol_type = other RNA
cacagcaaagcctctttggaggctgaatggggtcccccgactctggctttcccccaggtctacatgttcctgg

SEQ ID NO: 33718 - RNA, 73 nt, synthetic construct
  source 1..73: mol_type = other RNA
cacagcaaagcctctttggaggctgaatggggtcccccgactctggctttcccccaggtttacatgtttctgg

SEQ ID NO: 33719 - RNA, 73 nt, synthetic construct
  source 1..73: mol_type = other RNA
cacagcaaagcctctttggaggctgaatggggtcccccgactctggctttcccccaggtatacatgtttctgg

SEQ ID NO: 33720 - RNA, 73 nt, synthetic construct
  source 1..73: mol_type = other RNA
cacagcaaagcctctttggaggctgaatggggtcccccgactctggctttcccccaggtctacatgtttctgg

SEQ ID NO: 33721 - RNA, 73 nt, synthetic construct
  source 1..73: mol_type = other RNA
cacagcaaagcctctttggaggctgaatggggtcccccgactctggctttcccccaggtttacatgttcctgg

SEQ ID NO: 33722 - RNA, 73 nt, synthetic construct
  source 1..73: mol_type = other RNA
cacagcaaagcctctttggaggctgaatggggtcccccgactctggctttcccccaggtgtacatgttcctgg

SEQ ID NO: 33723 - RNA, 73 nt, synthetic construct
  source 1..73: mol_type = other RNA
cacagcaaagcctctttggaggctgaatggggtcccccgactctggctttcccccaggtgtacatgtttctgg

SEQ ID NO: 33724 - RNA, 73 nt, synthetic construct
  source 1..73: mol_type = other RNA
cacagcaaagcctctttggaggctgaatggggtcccccgactctggctttcccccaggtatacatgttcctgg

SEQ ID NO: 33725 - RNA, 74 nt, synthetic construct
  source 1..74: mol_type = other RNA
acacagcaaagcctctttggaggctgaatggggtcccccgactctggctttcccccaggtgtacatgttcctgg

SEQ ID NO: 33726 - RNA, 74 nt, synthetic construct
  source 1..74: mol_type = other RNA
acacagcaaagcctctttggaggctgaatggggtcccccgactctggctttcccccaggtatacatgtttctgg

SEQ ID NO: 33727 - RNA, 74 nt, synthetic construct
  source 1..74: mol_type = other RNA
acacagcaaagcctctttggaggctgaatggggtcccccgactctggctttcccccaggtctacatgttcctgg

SEQ ID NO: 33728 - RNA, 74 nt, synthetic construct
  source 1..74: mol_type = other RNA
acacagcaaagcctctttggaggctgaatggggtcccccgactctggctttcccccaggtctacatgtttctgg

SEQ ID NO: 33729 - RNA, 74 nt, synthetic construct
  source 1..74: mol_type = other RNA
acacagcaaagcctctttggaggctgaatggggtcccccgactctggctttcccccaggtgtacatgtttctgg

SEQ ID NO: 33730 - RNA, 74 nt, synthetic construct
  source 1..74: mol_type = other RNA
acacagcaaagcctctttggaggctgaatggggtcccccgactctggctttcccccaggtttacatgttcctgg

SEQ ID NO: 33731 - RNA, 74 nt, synthetic construct
  source 1..74: mol_type = other RNA
acacagcaaagcctctttggaggctgaatggggtcccccgactctggctttcccccaggtttacatgtttctgg

SEQ ID NO: 33732 - RNA, 74 nt, synthetic construct
  source 1..74: mol_type = other RNA
acacagcaaagcctctttggaggctgaatggggtcccccgactctggctttcccccaggtatacatgttcctgg

SEQ ID NO: 33733 - RNA, 75 nt, synthetic construct
  source 1..75: mol_type = other RNA
cacacagcaaagcctctttggaggctgaatggggtcccccgactctggctttcccccaggtctacatgttcctgg

SEQ ID NO: 33734 - RNA, 75 nt, synthetic construct
  source 1..75: mol_type = other RNA
cacacagcaaagcctctttggaggctgaatggggtcccccgactctggctttcccccaggtgtacatgttcctgg

SEQ ID NO: 33735 - RNA, 75 nt, synthetic construct
  source 1..75: mol_type = other RNA
cacacagcaaagcctctttggaggctgaatggggtcccccgactctggctttcccccaggtttacatgtttctgg

SEQ ID NO: 33736 - RNA, 75 nt, synthetic construct
  source 1..75: mol_type = other RNA
cacacagcaaagcctctttggaggctgaatggggtcccccgactctggctttcccccaggtatacatgtttctgg

SEQ ID NO: 33737 - RNA, 75 nt, synthetic construct
  source 1..75: mol_type = other RNA
cacacagcaaagcctctttggaggctgaatggggtcccccgactctggctttcccccaggtatacatgttcctgg

SEQ ID NO: 33738 - RNA, 75 nt, synthetic construct
  source 1..75: mol_type = other RNA
cacacagcaaagcctctttggaggctgaatggggtcccccgactctggctttcccccaggtgtacatgtttctgg

SEQ ID NO: 33739 - RNA, 75 nt, synthetic construct
  source 1..75: mol_type = other RNA
cacacagcaaagcctctttggaggctgaatggggtcccccgactctggctttcccccaggtctacatgtttctgg

SEQ ID NO: 33740 - RNA, 75 nt, synthetic construct
  source 1..75: mol_type = other RNA
cacacagcaaagcctctttggaggctgaatggggtcccccgactctggctttcccccaggtttacatgttcctgg

SEQ ID NO: 33741 - RNA, 76 nt, synthetic construct
  source 1..76: mol_type = other RNA
gcacacagcaaagcctctttggaggctgaatggggtcccccgactctggctttcccccaggtttacatgtttctgg

SEQ ID NO: 33742 - RNA, 76 nt, synthetic construct
  source 1..76: mol_type = other RNA
gcacacagcaaagcctctttggaggctgaatggggtcccccgactctggctttcccccaggtatacatgttcctgg

SEQ ID NO: 33743 - RNA, 76 nt, synthetic construct
  source 1..76: mol_type = other RNA
gcacacagcaaagcctctttggaggctgaatggggtcccccgactctggctttcccccaggtatacatgtttctgg

SEQ ID NO: 33744 - RNA, 76 nt, synthetic construct
  source 1..76: mol_type = other RNA
gcacacagcaaagcctctttggaggctgaatggggtcccccgactctggctttcccccaggtctacatgttcctgg

SEQ ID NO: 33745 - RNA, 76 nt, synthetic construct
  source 1..76: mol_type = other RNA
gcacacagcaaagcctctttggaggctgaatggggtcccccgactctggctttcccccaggtctacatgtttctgg

SEQ ID NO: 33746 - RNA, 76 nt, synthetic construct
  source 1..76: mol_type = other RNA
gcacacagcaaagcctctttggaggctgaatggggtcccccgactctggctttcccccaggtgtacatgttcctgg

SEQ ID NO: 33747 - RNA, 76 nt, synthetic construct
  source 1..76: mol_type = other RNA
gcacacagcaaagcctctttggaggctgaatggggtcccccgactctggctttcccccaggtttacatgttcctgg

SEQ ID NO: 33748 - RNA, 76 nt, synthetic construct
  source 1..76: mol_type = other RNA
gcacacagcaaagcctctttggaggctgaatggggtcccccgactctggctttcccccaggtgtacatgtttctgg

SEQ ID NO: 33749 - RNA, 77 nt, synthetic construct
  source 1..77: mol_type = other RNA
tgcacacagcaaagcctctttggaggctgaatggggtcccccgactctggctttcccccaggtgtacatgttcctgg

SEQ ID NO: 33750 - RNA, 77 nt, synthetic construct
  source 1..77: mol_type = other RNA
tgcacacagcaaagcctctttggaggctgaatggggtcccccgactctggctttcccccaggtctacatgtttctgg

SEQ ID NO: 33751 - RNA, 77 nt, synthetic construct
  source 1..77: mol_type = other RNA
tgcacacagcaaagcctctttggaggctgaatggggtcccccgactctggctttcccccaggtgtacatgtttctgg

SEQ ID NO: 33752 - RNA, 77 nt, synthetic construct
  source 1..77: mol_type = other RNA
tgcacacagcaaagcctctttggaggctgaatggggtcccccgactctggctttcccccaggtctacatgttcctgg

SEQ ID NO: 33753 - RNA, 77 nt, synthetic construct
  source 1..77: mol_type = other RNA
tgcacacagcaaagcctctttggaggctgaatggggtcccccgactctggctttcccccaggtatacatgtttctgg

SEQ ID NO: 33754 - RNA, 77 nt, synthetic construct
  source 1..77: mol_type = other RNA
tgcacacagcaaagcctctttggaggctgaatggggtcccccgactctggctttcccccaggtttacatgttcctgg

SEQ ID NO: 33755 - RNA, 77 nt, synthetic construct
  source 1..77: mol_type = other RNA
tgcacacagcaaagcctctttggaggctgaatggggtcccccgactctggctttcccccaggtttacatgtttctgg

SEQ ID NO: 33756 - RNA, 77 nt, synthetic construct
  source 1..77: mol_type = other RNA
tgcacacagcaaagcctctttggaggctgaatggggtcccccgactctggctttcccccaggtatacatgttcctgg

SEQ ID NO: 33757 - RNA, 78 nt, synthetic construct
  source 1..78: mol_type = other RNA
gtgcacacagcaaagcctctttggaggctgaatggggtcccccgactctggctttcccccaggtttacatgtttctgg

SEQ ID NO: 33758 - RNA, 78 nt, synthetic construct
  source 1..78: mol_type = other RNA
gtgcacacagcaaagcctctttggaggctgaatggggtcccccgactctggctttcccccaggtttacatgttcctgg

SEQ ID NO: 33759 - RNA, 78 nt, synthetic construct
  source 1..78: mol_type = other RNA
gtgcacacagcaaagcctctttggaggctgaatggggtcccccgactctggctttcccccaggtgtacatgtttctgg

SEQ ID NO: 33760 - RNA, 78 nt, synthetic construct
  source 1..78: mol_type = other RNA
gtgcacacagcaaagcctctttggaggctgaatggggtcccccgactctggctttcccccaggtctacatgttcctgg

SEQ ID NO: 33761 - RNA, 78 nt, synthetic construct
  source 1..78: mol_type = other RNA
gtgcacacagcaaagcctctttggaggctgaatggggtcccccgactctggctttcccccaggtatacatgtttctgg

SEQ ID NO: 33762 - RNA, 78 nt, synthetic construct
  source 1..78: mol_type = other RNA
gtgcacacagcaaagcctctttggaggctgaatggggtcccccgactctggctttcccccaggtatacatgttcctgg

SEQ ID NO: 33763 - RNA, 78 nt, synthetic construct
  source 1..78: mol_type = other RNA
gtgcacacagcaaagcctctttggaggctgaatggggtcccccgactctggctttcccccaggtctacatgtttctgg

SEQ ID NO: 33764 - RNA, 78 nt, synthetic construct
  source 1..78: mol_type = other RNA
gtgcacacagcaaagcctctttggaggctgaatggggtcccccgactctggctttcccccaggtgtacatgttcctgg

SEQ ID NO: 33765 - RNA, 79 nt, synthetic construct
  source 1..79: mol_type = other RNA
ggtgcacacagcaaagcctctttggaggctgaatggggtcccccgactctggctttcccccaggtgtacatgttcctgg

SEQ ID NO: 33766 - RNA, 79 nt, synthetic construct
  source 1..79: mol_type = other RNA
ggtgcacacagcaaagcctctttggaggctgaatggggtcccccgactctggctttcccccaggtctacatgttcctgg

SEQ ID NO: 33767 - RNA, 79 nt, synthetic construct
  source 1..79: mol_type = other RNA
ggtgcacacagcaaagcctctttggaggctgaatggggtcccccgactctggctttcccccaggtctacatgtttctgg

SEQ ID NO: 33768 - RNA, 79 nt, synthetic construct
  source 1..79: mol_type = other RNA
ggtgcacacagcaaagcctctttggaggctgaatggggtcccccgactctggctttcccccaggtgtacatgtttctgg

SEQ ID NO: 33769 - RNA, 79 nt, synthetic construct
  source 1..79: mol_type = other RNA
ggtgcacacagcaaagcctctttggaggctgaatggggtcccccgactctggctttcccccaggtttacatgttcctgg

SEQ ID NO: 33770 - RNA, 79 nt, synthetic construct
  source 1..79: mol_type = other RNA
ggtgcacacagcaaagcctctttggaggctgaatggggtcccccgactctggctttcccccaggtttacatgtttctgg

SEQ ID NO: 33771 - RNA, 79 nt, synthetic construct
  source 1..79: mol_type = other RNA
ggtgcacacagcaaagcctctttggaggctgaatggggtcccccgactctggctttcccccaggtatacatgtttctgg

SEQ ID NO: 33772 - RNA, 79 nt, synthetic construct
  source 1..79: mol_type = other RNA
ggtgcacacagcaaagcctctttggaggctgaatggggtcccccgactctggctttcccccaggtatacatgttcctgg

SEQ ID NO: 33773 - RNA, 80 nt, synthetic construct
  source 1..80: mol_type = other RNA
gggtgcacacagcaaagcctctttggaggctgaatggggtcccccgactctggctttcccccaggtatacatgttcctgg

SEQ ID NO: 33774 - RNA, 80 nt, synthetic construct
  source 1..80: mol_type = other RNA
gggtgcacacagcaaagcctctttggaggctgaatggggtcccccgactctggctttcccccaggtgtacatgttcctgg

SEQ ID NO: 33775 - RNA, 80 nt, synthetic construct
  source 1..80: mol_type = other RNA
gggtgcacacagcaaagcctctttggaggctgaatggggtcccccgactctggctttcccccaggtttacatgttcctgg

SEQ ID NO: 33776 - RNA, 80 nt, synthetic construct
  source 1..80: mol_type = other RNA
gggtgcacacagcaaagcctctttggaggctgaatggggtcccccgactctggctttcccccaggtttacatgtttctgg

SEQ ID NO: 33777 - RNA, 80 nt, synthetic construct
  source 1..80: mol_type = other RNA
gggtgcacacagcaaagcctctttggaggctgaatggggtcccccgactctggctttcccccaggtctacatgttcctgg

SEQ ID NO: 33778 - RNA, 80 nt, synthetic construct
  source 1..80: mol_type = other RNA
gggtgcacacagcaaagcctctttggaggctgaatggggtcccccgactctggctttcccccaggtgtacatgtttctgg

SEQ ID NO: 33779 - RNA, 80 nt, synthetic construct
  source 1..80: mol_type = other RNA
gggtgcacacagcaaagcctctttggaggctgaatggggtcccccgactctggctttcccccaggtctacatgtttctgg

SEQ ID NO: 33780 - RNA, 80 nt, synthetic construct
  source 1..80: mol_type = other RNA
gggtgcacacagcaaagcctctttggaggctgaatggggtcccccgactctggctttcccccaggtatacatgtttctgg

SEQ ID NO: 33781 - RNA, 81 nt, synthetic construct
  source 1..81: mol_type = other RNA
tgggtgcacacagcaaagcctctttggaggctgaatggggtcccccgactctggctttcccccaggtgtacatgtttctgg

SEQ ID NO: 33782 - RNA, 81 nt, synthetic construct
  source 1..81: mol_type = other RNA
tgggtgcacacagcaaagcctctttggaggctgaatggggtcccccgactctggctttcccccaggtctacatgttcctgg

SEQ ID NO: 33783 - RNA, 81 nt, synthetic construct
  source 1..81: mol_type = other RNA
tgggtgcacacagcaaagcctctttggaggctgaatggggtcccccgactctggctttcccccaggtatacatgttcctgg

SEQ ID NO: 33784 - RNA, 81 nt, synthetic construct
  source 1..81: mol_type = other RNA
tgggtgcacacagcaaagcctctttggaggctgaatggggtcccccgactctggctttcccccaggtatacatgtttctgg

SEQ ID NO: 33785 - RNA, 81 nt, synthetic construct
  source 1..81: mol_type = other RNA
tgggtgcacacagcaaagcctctttggaggctgaatggggtcccccgactctggctttcccccaggtctacatgtttctgg

SEQ ID NO: 33786 - RNA, 81 nt, synthetic construct
  source 1..81: mol_type = other RNA
tgggtgcacacagcaaagcctctttggaggctgaatggggtcccccgactctggctttcccccaggtgtacatgttcctgg

SEQ ID NO: 33787 - RNA, 81 nt, synthetic construct
  source 1..81: mol_type = other RNA
tgggtgcacacagcaaagcctctttggaggctgaatggggtcccccgactctggctttcccccaggtttacatgtttctgg

SEQ ID NO: 33788 - RNA, 81 nt, synthetic construct
  source 1..81: mol_type = other RNA
tgggtgcacacagcaaagcctctttggaggctgaatggggtcccccgactctggctttcccccaggtttacatgttcctgg

SEQ ID NO: 33789 - RNA, 82 nt, synthetic construct
  source 1..82: mol_type = other RNA
ctgggtgcacacagcaaagcctctttggaggctgaatggggtcccccgactctggctttcccccaggtttacatgttcctgg

SEQ ID NO: 33790 - RNA, 82 nt, synthetic construct
  source 1..82: mol_type = other RNA
ctgggtgcacacagcaaagcctctttggaggctgaatggggtcccccgactctggctttcccccaggtctacatgttcctgg

SEQ ID NO: 33791 - RNA, 82 nt, synthetic construct
  source 1..82: mol_type = other RNA
ctgggtgcacacagcaaagcctctttggaggctgaatggggtcccccgactctggctttcccccaggtgtacatgttcctgg

SEQ ID NO: 33792 - RNA, 82 nt, synthetic construct
  source 1..82: mol_type = other RNA
ctgggtgcacacagcaaagcctctttggaggctgaatggggtcccccgactctggctttcccccaggtttacatgtttctgg

SEQ ID NO: 33793 - RNA, 82 nt, synthetic construct
  source 1..82: mol_type = other RNA
ctgggtgcacacagcaaagcctctttggaggctgaatggggtcccccgactctggctttcccccaggtctacatgtttctgg

SEQ ID NO: 33794 - RNA, 82 nt, synthetic construct
  source 1..82: mol_type = other RNA
ctgggtgcacacagcaaagcctctttggaggctgaatggggtcccccgactctggctttcccccaggtatacatgtttctgg

SEQ ID NO: 33795 - RNA, 82 nt, synthetic construct
  source 1..82: mol_type = other RNA
ctgggtgcacacagcaaagcctctttggaggctgaatggggtcccccgactctggctttcccccaggtatacatgttcctgg

SEQ ID NO: 33796 - RNA, 82 nt, synthetic construct
  source 1..82: mol_type = other RNA
ctgggtgcacacagcaaagcctctttggaggctgaatggggtcccccgactctggctttcccccaggtgtacatgtttctgg

SEQ ID NO: 33797 - RNA, 83 nt, synthetic construct
  source 1..83: mol_type = other RNA
cctgggtgcacacagcaaagcctctttggaggctgaatggggtcccccgactctggctttcccccaggtgtacatgttcctgg

SEQ ID NO: 33798 - RNA, 83 nt, synthetic construct
  source 1..83: mol_type = other RNA
cctgggtgcacacagcaaagcctctttggaggctgaatggggtcccccgactctggctttcccccaggtttacatgttcctgg

SEQ ID NO: 33799 - RNA, 83 nt, synthetic construct
  source 1..83: mol_type = other RNA
cctgggtgcacacagcaaagcctctttggaggctgaatggggtcccccgactctggctttcccccaggtttacatgtttctgg

SEQ ID NO: 33800 - RNA, 83 nt, synthetic construct
  source 1..83: mol_type = other RNA
cctgggtgcacacagcaaagcctctttggaggctgaatggggtcccccgactctggctttcccccaggtgtacatgtttctgg

SEQ ID NO: 33801 - RNA, 83 nt, synthetic construct
  source 1..83: mol_type = other RNA
cctgggtgcacacagcaaagcctctttggaggctgaatggggtcccccgactctggctttcccccaggtctacatgtttctgg

SEQ ID NO: 33802 - RNA, 83 nt, synthetic construct
  source 1..83: mol_type = other RNA
cctgggtgcacacagcaaagcctctttggaggctgaatggggtcccccgactctggctttcccccaggtatacatgtttctgg

SEQ ID NO: 33803 - RNA, 83 nt, synthetic construct
  source 1..83: mol_type = other RNA
cctgggtgcacacagcaaagcctctttggaggctgaatggggtcccccgactctggctttcccccaggtatacatgttcctgg

SEQ ID NO: 33804 - RNA, 83 nt, synthetic construct
  source 1..83: mol_type = other RNA
cctgggtgcacacagcaaagcctctttggaggctgaatggggtcccccgactctggctttcccccaggtctacatgttcctgg

SEQ ID NO: 33805 - RNA, 84 nt, synthetic construct
  source 1..84: mol_type = other RNA
tcctgggtgcacacagcaaagcctctttggaggctgaatggggtcccccgactctggctttcccccaggtgtacatgtttctgg

SEQ ID NO: 33806 - RNA, 84 nt, synthetic construct
  source 1..84: mol_type = other RNA
tcctgggtgcacacagcaaagcctctttggaggctgaatggggtcccccgactctggctttcccccaggtttacatgtttctgg

SEQ ID NO: 33807 - RNA, 84 nt, synthetic construct
  source 1..84: mol_type = other RNA
tcctgggtgcacacagcaaagcctctttggaggctgaatggggtcccccgactctggctttcccccaggtttacatgttcctgg

SEQ ID NO: 33808 - RNA, 84 nt, synthetic construct
  source 1..84: mol_type = other RNA
tcctgggtgcacacagcaaagcctctttggaggctgaatggggtcccccgactctggctttcccccaggtgtacatgttcctgg

SEQ ID NO: 33809 - RNA, 84 nt, synthetic construct
  source 1..84: mol_type = other RNA
tcctgggtgcacacagcaaagcctctttggaggctgaatggggtcccccgactctggctttcccccaggtctacatgttcctgg

SEQ ID NO: 33810 - RNA, 84 nt, synthetic construct
  source 1..84: mol_type = other RNA
tcctgggtgcacacagcaaagcctctttggaggctgaatggggtcccccgactctggctttcccccaggtatacatgtttctgg

SEQ ID NO: 33811 - RNA, 84 nt, synthetic construct
  source 1..84: mol_type = other RNA
tcctgggtgcacacagcaaagcctctttggaggctgaatggggtcccccgactctggctttcccccaggtctacatgtttctgg

SEQ ID NO: 33812 - RNA, 84 nt, synthetic construct
  source 1..84: mol_type = other RNA
tcctgggtgcacacagcaaagcctctttggaggctgaatggggtcccccgactctggctttcccccaggtatacatgttcctgg

SEQ ID NO: 33813 - RNA, 85 nt, synthetic construct
  source 1..85: mol_type = other RNA
atcctgggtgcacacagcaaagcctctttggaggctgaatggggtcccccgactctggctttcccccaggtgtacatgttcctgg

SEQ ID NO: 33814 - RNA, 85 nt, synthetic construct
  source 1..85: mol_type = other RNA
atcctgggtgcacacagcaaagcctctttggaggctgaatggggtcccccgactctggctttcccccaggtatacatgtttctgg

SEQ ID NO: 33815 - RNA, 85 nt, synthetic construct
  source 1..85: mol_type = other RNA
atcctgggtgcacacagcaaagcctctttggaggctgaatggggtcccccgactctggctttcccccaggtctacatgtttctgg

SEQ ID NO: 33816 - RNA, 85 nt, synthetic construct
  source 1..85: mol_type = other RNA
atcctgggtgcacacagcaaagcctctttggaggctgaatggggtcccccgactctggctttcccccaggtatacatgttcctgg

SEQ ID NO: 33817 - RNA, 85 nt, synthetic construct
  source 1..85: mol_type = other RNA
atcctgggtgcacacagcaaagcctctttggaggctgaatggggtcccccgactctggctttcccccaggtctacatgttcctgg

SEQ ID NO: 33818 - RNA, 85 nt, synthetic construct
  source 1..85: mol_type = other RNA
atcctgggtgcacacagcaaagcctctttggaggctgaatggggtcccccgactctggctttcccccaggtttacatgtttctgg

SEQ ID NO: 33819 - RNA, 85 nt, synthetic construct
  source 1..85: mol_type = other RNA
atcctgggtgcacacagcaaagcctctttggaggctgaatggggtcccccgactctggctttcccccaggtttacatgttcctgg

SEQ ID NO: 33820 - RNA, 85 nt, synthetic construct
  source 1..85: mol_type = other RNA
atcctgggtgcacacagcaaagcctctttggaggctgaatggggtcccccgactctggctttcccccaggtgtacatgtttctgg

SEQ ID NO: 33821 - RNA, 86 nt, synthetic construct
  source 1..86: mol_type = other RNA
gatcctgggtgcacacagcaaagcctctttggaggctgaatggggtcccccgactctggctttcccccaggtgtacatgtttctgg

SEQ ID NO: 33822 - RNA, 86 nt, synthetic construct
  source 1..86: mol_type = other RNA
gatcctgggtgcacacagcaaagcctctttggaggctgaatggggtcccccgactctggctttcccccaggtttacatgtttctgg

SEQ ID NO: 33823 - RNA, 86 nt, synthetic construct
  source 1..86: mol_type = other RNA
gatcctgggtgcacacagcaaagcctctttggaggctgaatggggtcccccgactctggctttcccccaggtatacatgtttctgg

SEQ ID NO: 33824 - RNA, 86 nt, synthetic construct
  source 1..86: mol_type = other RNA
gatcctgggtgcacacagcaaagcctctttggaggctgaatggggtcccccgactctggctttcccccaggtatacatgttcctgg

SEQ ID NO: 33825 - RNA, 86 nt, synthetic construct
  source 1..86: mol_type = other RNA
gatcctgggtgcacacagcaaagcctctttggaggctgaatggggtcccccgactctggctttcccccaggtctacatgttcctgg

SEQ ID NO: 33826 - RNA, 86 nt, synthetic construct
  source 1..86: mol_type = other RNA
gatcctgggtgcacacagcaaagcctctttggaggctgaatggggtcccccgactctggctttcccccaggtctacatgtttctgg

SEQ ID NO: 33827 - RNA, 86 nt, synthetic construct
  source 1..86: mol_type = other RNA
gatcctgggtgcacacagcaaagcctctttggaggctgaatggggtcccccgactctggctttcccccaggtgtacatgttcctgg

SEQ ID NO: 33828 - RNA, 86 nt, synthetic construct
  source 1..86: mol_type = other RNA
gatcctgggtgcacacagcaaagcctctttggaggctgaatggggtcccccgactctggctttcccccaggtttacatgttcctgg

SEQ ID NO: 33829 - RNA, 87 nt, synthetic construct
  source 1..87: mol_type = other RNA
ggatcctgggtgcacacagcaaagcctctttggaggctgaatggggtcccccgactctggctttcccccaggtgtacatgttcctgg

SEQ ID NO: 33830 - RNA, 87 nt, synthetic construct
  source 1..87: mol_type = other RNA
ggatcctgggtgcacacagcaaagcctctttggaggctgaatggggtcccccgactctggctttcccccaggtatacatgttcctgg

SEQ ID NO: 33831 - RNA, 87 nt, synthetic construct
  source 1..87: mol_type = other RNA
ggatcctgggtgcacacagcaaagcctctttggaggctgaatggggtcccccgactctggctttcccccaggtgtacatgtttctgg

SEQ ID NO: 33832 - RNA, 87 nt, synthetic construct
  source 1..87: mol_type = other RNA
ggatcctgggtgcacacagcaaagcctctttggaggctgaatggggtcccccgactctggctttcccccaggtctacatgttcctgg

SEQ ID NO: 33833 - RNA, 87 nt, synthetic construct
  source 1..87: mol_type = other RNA
ggatcctgggtgcacacagcaaagcctctttggaggctgaatggggtcccccgactctggctttcccccaggtttacatgtttctgg

SEQ ID NO: 33834 - RNA, 87 nt, synthetic construct
  source 1..87: mol_type = other RNA
ggatcctgggtgcacacagcaaagcctctttggaggctgaatggggtcccccgactctggctttcccccaggtatacatgtttctgg

SEQ ID NO: 33835 - RNA, 87 nt, synthetic construct
  source 1..87: mol_type = other RNA
ggatcctgggtgcacacagcaaagcctctttggaggctgaatggggtcccccgactctggctttcccccaggtctacatgtttctgg

SEQ ID NO: 33836 - RNA, 87 nt, synthetic construct
  source 1..87: mol_type = other RNA
ggatcctgggtgcacacagcaaagcctctttggaggctgaatggggtcccccgactctggctttcccccaggtttacatgttcctgg

SEQ ID NO: 33837 - RNA, 88 nt, synthetic construct
  source 1..88: mol_type = other RNA
gggatcctgggtgcacacagcaaagcctctttggaggctgaatggggtcccccgactctggctttcccccaggtgtacatgtttctgg

SEQ ID NO: 33838 - RNA, 88 nt, synthetic construct
  source 1..88: mol_type = other RNA
gggatcctgggtgcacacagcaaagcctctttggaggctgaatggggtcccccgactctggctttcccccaggtatacatgtttctgg

SEQ ID NO: 33839 - RNA, 88 nt, synthetic construct
  source 1..88: mol_type = other RNA
gggatcctgggtgcacacagcaaagcctctttggaggctgaatggggtcccccgactctggctttcccccaggtctacatgttcctgg

SEQ ID NO: 33840 - RNA, 88 nt, synthetic construct
  source 1..88: mol_type = other RNA
gggatcctgggtgcacacagcaaagcctctttggaggctgaatggggtcccccgactctggctttcccccaggtgtacatgttcctgg

SEQ ID NO: 33841 - RNA, 88 nt, synthetic construct
  source 1..88: mol_type = other RNA
gggatcctgggtgcacacagcaaagcctctttggaggctgaatggggtcccccgactctggctttcccccaggtttacatgtttctgg

SEQ ID NO: 33842 - RNA, 88 nt, synthetic construct
  source 1..88: mol_type = other RNA
gggatcctgggtgcacacagcaaagcctctttggaggctgaatggggtcccccgactctggctttcccccaggtctacatgtttctgg

SEQ ID NO: 33843 - RNA, 88 nt, synthetic construct
  source 1..88: mol_type = other RNA
gggatcctgggtgcacacagcaaagcctctttggaggctgaatggggtcccccgactctggctttcccccaggtatacatgttcctgg

SEQ ID NO: 33844 - RNA, 88 nt, synthetic construct
  source 1..88: mol_type = other RNA
gggatcctgggtgcacacagcaaagcctctttggaggctgaatggggtcccccgactctggctttcccccaggtttacatgttcctgg

SEQ ID NO: 33845 - RNA, 89 nt, synthetic construct
  source 1..89: mol_type = other RNA
tgggatcctgggtgcacacagcaaagcctctttggaggctgaatggggtcccccgactctggctttcccccaggtctacatgtttctgg

SEQ ID NO: 33846 - RNA, 89 nt, synthetic construct
  source 1..89: mol_type = other RNA
tgggatcctgggtgcacacagcaaagcctctttggaggctgaatggggtcccccgactctggctttcccccaggtctacatgttcctgg

SEQ ID NO: 33847 - RNA, 89 nt, synthetic construct
  source 1..89: mol_type = other RNA
tgggatcctgggtgcacacagcaaagcctctttggaggctgaatggggtcccccgactctggctttcccccaggtatacatgtttctgg

SEQ ID NO: 33848 - RNA, 89 nt, synthetic construct
  source 1..89: mol_type = other RNA
tgggatcctgggtgcacacagcaaagcctctttggaggctgaatggggtcccccgactctggctttcccccaggtgtacatgttcctgg

SEQ ID NO: 33849 - RNA, 89 nt, synthetic construct
  source 1..89: mol_type = other RNA
tgggatcctgggtgcacacagcaaagcctctttggaggctgaatggggtcccccgactctggctttcccccaggtatacatgttcctgg

SEQ ID NO: 33850 - RNA, 89 nt, synthetic construct
  source 1..89: mol_type = other RNA
tgggatcctgggtgcacacagcaaagcctctttggaggctgaatggggtcccccgactctggctttcccccaggtgtacatgtttctgg

SEQ ID NO: 33851 - RNA, 89 nt, synthetic construct
  source 1..89: mol_type = other RNA
tgggatcctgggtgcacacagcaaagcctctttggaggctgaatggggtcccccgactctggctttcccccaggtttacatgtttctgg

SEQ ID NO: 33852 - RNA, 89 nt, synthetic construct
  source 1..89: mol_type = other RNA
tgggatcctgggtgcacacagcaaagcctctttggaggctgaatggggtcccccgactctggctttcccccaggtttacatgttcctgg

SEQ ID NO: 33853 - RNA, 90 nt, synthetic construct
  source 1..90: mol_type = other RNA
gtgggatcctgggtgcacacagcaaagcctctttggaggctgaatggggtcccccgactctggctttcccccaggtctacatgttcctgg

SEQ ID NO: 33854 - RNA, 90 nt, synthetic construct
  source 1..90: mol_type = other RNA
gtgggatcctgggtgcacacagcaaagcctctttggaggctgaatggggtcccccgactctggctttcccccaggtttacatgtttctgg

SEQ ID NO: 33855 - RNA, 90 nt, synthetic construct
  source 1..90: mol_type = other RNA
gtgggatcctgggtgcacacagcaaagcctctttggaggctgaatggggtcccccgactctggctttcccccaggtttacatgttcctgg

SEQ ID NO: 33856 - RNA, 90 nt, synthetic construct
  source 1..90: mol_type = other RNA
gtgggatcctgggtgcacacagcaaagcctctttggaggctgaatggggtcccccgactctggctttcccccaggtctacatgtttctgg

SEQ ID NO: 33857 - RNA, 90 nt, synthetic construct
  source 1..90: mol_type = other RNA
gtgggatcctgggtgcacacagcaaagcctctttggaggctgaatggggtcccccgactctggctttcccccaggtgtacatgttcctgg

SEQ ID NO: 33858 - RNA, 90 nt, synthetic construct
  source 1..90: mol_type = other RNA
gtgggatcctgggtgcacacagcaaagcctctttggaggctgaatggggtcccccgactctggctttcccccaggtatacatgtttctgg

SEQ ID NO: 33859 - RNA, 90 nt, synthetic construct
  source 1..90: mol_type = other RNA
gtgggatcctgggtgcacacagcaaagcctctttggaggctgaatggggtcccccgactctggctttcccccaggtatacatgttcctgg

SEQ ID NO: 33860 - RNA, 90 nt, synthetic construct
  source 1..90: mol_type = other RNA
gtgggatcctgggtgcacacagcaaagcctctttggaggctgaatggggtcccccgactctggctttcccccaggtgtacatgtttctgg

SEQ ID NO: 33861 - RNA, 91 nt, synthetic construct
  source 1..91: mol_type = other RNA
agtgggatcctgggtgcacacagcaaagcctctttggaggctgaatggggtcccccgactctggctttcccccaggtgtacatgtttctgg

SEQ ID NO: 33862 - RNA, 91 nt, synthetic construct
  source 1..91: mol_type = other RNA
agtgggatcctgggtgcacacagcaaagcctctttggaggctgaatggggtcccccgactctggctttcccccaggtttacatgtttctgg

SEQ ID NO: 33863 - RNA, 91 nt, synthetic construct
  source 1..91: mol_type = other RNA
agtgggatcctgggtgcacacagcaaagcctctttggaggctgaatggggtcccccgactctggctttcccccaggtttacatgttcctgg

SEQ ID NO: 33864 - RNA, 91 nt, synthetic construct
  source 1..91: mol_type = other RNA
agtgggatcctgggtgcacacagcaaagcctctttggaggctgaatggggtcccccgactctggctttcccccaggtgtacatgttcctgg

SEQ ID NO: 33865 - RNA, 91 nt, synthetic construct
  source 1..91: mol_type = other RNA
agtgggatcctgggtgcacacagcaaagcctctttggaggctgaatggggtcccccgactctggctttcccccaggtatacatgtttctgg

SEQ ID NO: 33866 - RNA, 91 nt, synthetic construct
  source 1..91: mol_type = other RNA
agtgggatcctgggtgcacacagcaaagcctctttggaggctgaatggggtcccccgactctggctttcccccaggtatacatgttcctgg

SEQ ID NO: 33867 - RNA, 91 nt, synthetic construct
  source 1..91: mol_type = other RNA
agtgggatcctgggtgcacacagcaaagcctctttggaggctgaatggggtcccccgactctggctttcccccaggtctacatgtttctgg

SEQ ID NO: 33868 - RNA, 91 nt, synthetic construct
  source 1..91: mol_type = other RNA
agtgggatcctgggtgcacacagcaaagcctctttggaggctgaatggggtcccccgactctggctttcccccaggtctacatgttcctgg

SEQ ID NO: 33869 - RNA, 92 nt, synthetic construct
  source 1..92: mol_type = other RNA
tagtgggatcctgggtgcacacagcaaagcctctttggaggctgaatggggtcccccgactctggctttcccccaggtttacatgtttctgg

SEQ ID NO: 33870 - RNA, 92 nt, synthetic construct
  source 1..92: mol_type = other RNA
tagtgggatcctgggtgcacacagcaaagcctctttggaggctgaatggggtcccccgactctggctttcccccaggtttacatgttcctgg

SEQ ID NO: 33871 - RNA, 92 nt, synthetic construct
  source 1..92: mol_type = other RNA
tagtgggatcctgggtgcacacagcaaagcctctttggaggctgaatggggtcccccgactctggctttcccccaggtgtacatgttcctgg

SEQ ID NO: 33872 - RNA, 92 nt, synthetic construct
  source 1..92: mol_type = other RNA
tagtgggatcctgggtgcacacagcaaagcctctttggaggctgaatggggtcccccgactctggctttcccccaggtatacatgttcctgg

SEQ ID NO: 33873 - RNA, 92 nt, synthetic construct
  source 1..92: mol_type = other RNA
tagtgggatcctgggtgcacacagcaaagcctctttggaggctgaatggggtcccccgactctggctttcccccaggtatacatgtttctgg

SEQ ID NO: 33874 - RNA, 92 nt, synthetic construct
  source 1..92: mol_type = other RNA
tagtgggatcctgggtgcacacagcaaagcctctttggaggctgaatggggtcccccgactctggctttcccccaggtctacatgtttctgg

SEQ ID NO: 33875 - RNA, 92 nt, synthetic construct
  source 1..92: mol_type = other RNA
tagtgggatcctgggtgcacacagcaaagcctctttggaggctgaatggggtcccccgactctggctttcccccaggtgtacatgtttctgg

SEQ ID NO: 33876 - RNA, 92 nt, synthetic construct
  source 1..92: mol_type = other RNA
tagtgggatcctgggtgcacacagcaaagcctctttggaggctgaatggggtcccccgactctggctttcccccaggtctacatgttcctgg

SEQ ID NO: 33877 - RNA, 93 nt, synthetic construct
  source 1..93: mol_type = other RNA
gtagtgggatcctgggtgcacacagcaaagcctctttggaggctgaatggggtcccccgactctggctttcccccaggtttacatgtttctgg

SEQ ID NO: 33878 - RNA, 93 nt, synthetic construct
  source 1..93: mol_type = other RNA
gtagtgggatcctgggtgcacacagcaaagcctctttggaggctgaatggggtcccccgactctggctttcccccaggtttacatgttcctgg

SEQ ID NO: 33879 - RNA, 93 nt, synthetic construct
  source 1..93: mol_type = other RNA
gtagtgggatcctgggtgcacacagcaaagcctctttggaggctgaatggggtcccccgactctggctttcccccaggtatacatgtttctgg

SEQ ID NO: 33880 - RNA, 93 nt, synthetic construct
  source 1..93: mol_type = other RNA
gtagtgggatcctgggtgcacacagcaaagcctctttggaggctgaatggggtcccccgactctggctttcccccaggtctacatgtttctgg

SEQ ID NO: 33881 - RNA, 93 nt, synthetic construct
  source 1..93: mol_type = other RNA
gtagtgggatcctgggtgcacacagcaaagcctctttggaggctgaatggggtcccccgactctggctttcccccaggtctacatgttcctgg

SEQ ID NO: 33882 - RNA, 93 nt, synthetic construct
  source 1..93: mol_type = other RNA
gtagtgggatcctgggtgcacacagcaaagcctctttggaggctgaatggggtcccccgactctggctttcccccaggtatacatgttcctgg

SEQ ID NO: 33883 - RNA, 93 nt, synthetic construct
  source 1..93: mol_type = other RNA
gtagtgggatcctgggtgcacacagcaaagcctctttggaggctgaatggggtcccccgactctggctttcccccaggtgtacatgtttctgg

SEQ ID NO: 33884 - RNA, 93 nt, synthetic construct
  source 1..93: mol_type = other RNA
gtagtgggatcctgggtgcacacagcaaagcctctttggaggctgaatggggtcccccgactctggctttcccccaggtgtacatgttcctgg

SEQ ID NO: 33885 - RNA, 94 nt, synthetic construct
  source 1..94: mol_type = other RNA
ggtagtgggatcctgggtgcacacagcaaagcctctttggaggctgaatggggtcccccgactctggctttcccccaggtgtacatgttcctgg

SEQ ID NO: 33886 - RNA, 94 nt, synthetic construct
  source 1..94: mol_type = other RNA
ggtagtgggatcctgggtgcacacagcaaagcctctttggaggctgaatggggtcccccgactctggctttcccccaggtatacatgttcctgg

SEQ ID NO: 33887 - RNA, 94 nt, synthetic construct
  source 1..94: mol_type = other RNA
ggtagtgggatcctgggtgcacacagcaaagcctctttggaggctgaatggggtcccccgactctggctttcccccaggtatacatgtttctgg

SEQ ID NO: 33888 - RNA, 94 nt, synthetic construct
  source 1..94: mol_type = other RNA
ggtagtgggatcctgggtgcacacagcaaagcctctttggaggctgaatggggtcccccgactctggctttcccccaggtctacatgttcctgg

SEQ ID NO: 33889 - RNA, 94 nt, synthetic construct
  source 1..94: mol_type = other RNA
ggtagtgggatcctgggtgcacacagcaaagcctctttggaggctgaatggggtcccccgactctggctttcccccaggtctacatgtttctgg

SEQ ID NO: 33890 - RNA, 94 nt, synthetic construct
  source 1..94: mol_type = other RNA
ggtagtgggatcctgggtgcacacagcaaagcctctttggaggctgaatggggtcccccgactctggctttcccccaggtttacatgtttctgg

SEQ ID NO: 33891 - RNA, 94 nt, synthetic construct
  source 1..94: mol_type = other RNA
ggtagtgggatcctgggtgcacacagcaaagcctctttggaggctgaatggggtcccccgactctggctttcccccaggtgtacatgtttctgg

SEQ ID NO: 33892 - RNA, 94 nt, synthetic construct
  source 1..94: mol_type = other RNA
ggtagtgggatcctgggtgcacacagcaaagcctctttggaggctgaatggggtcccccgactctggctttcccccaggtttacatgttcctgg

SEQ ID NO: 33893 - RNA, 95 nt, synthetic construct
  source 1..95: mol_type = other RNA
gggtagtgggatcctgggtgcacacagcaaagcctctttggaggctgaatggggtcccccgactctggctttcccccaggtctacatgtttctgg

SEQ ID NO: 33894 - RNA, 95 nt, synthetic construct
  source 1..95: mol_type = other RNA
gggtagtgggatcctgggtgcacacagcaaagcctctttggaggctgaatggggtcccccgactctggctttcccccaggtgtacatgttcctgg

SEQ ID NO: 33895 - RNA, 95 nt, synthetic construct
  source 1..95: mol_type = other RNA
gggtagtgggatcctgggtgcacacagcaaagcctctttggaggctgaatggggtcccccgactctggctttcccccaggtttacatgttcctgg

SEQ ID NO: 33896 - RNA, 95 nt, synthetic construct
  source 1..95: mol_type = other RNA
gggtagtgggatcctgggtgcacacagcaaagcctctttggaggctgaatggggtcccccgactctggctttcccccaggtttacatgtttctgg

SEQ ID NO: 33897 - RNA, 95 nt, synthetic construct
  source 1..95: mol_type = other RNA
gggtagtgggatcctgggtgcacacagcaaagcctctttggaggctgaatggggtcccccgactctggctttcccccaggtctacatgttcctgg

SEQ ID NO: 33898 - RNA, 95 nt, synthetic construct
  source 1..95: mol_type = other RNA
gggtagtgggatcctgggtgcacacagcaaagcctctttggaggctgaatggggtcccccgactctggctttcccccaggtatacatgtttctgg

SEQ ID NO: 33899 - RNA, 95 nt, synthetic construct
  source 1..95: mol_type = other RNA
gggtagtgggatcctgggtgcacacagcaaagcctctttggaggctgaatggggtcccccgactctggctttcccccaggtatacatgttcctgg

SEQ ID NO: 33900 - RNA, 95 nt, synthetic construct
  source 1..95: mol_type = other RNA
gggtagtgggatcctgggtgcacacagcaaagcctctttggaggctgaatggggtcccccgactctggctttcccccaggtgtacatgtttctgg

SEQ ID NO: 33901 - RNA, 96 nt, synthetic construct
  source 1..96: mol_type = other RNA
tgggtagtgggatcctgggtgcacacagcaaagcctctttggaggctgaatggggtcccccgactctggctttcccccaggtctacatgtttctgg

SEQ ID NO: 33902 - RNA, 96 nt, synthetic construct
  source 1..96: mol_type = other RNA
tgggtagtgggatcctgggtgcacacagcaaagcctctttggaggctgaatggggtcccccgactctggctttcccccaggtttacatgtttctgg

SEQ ID NO: 33903 - RNA, 96 nt, synthetic construct
  source 1..96: mol_type = other RNA
tgggtagtgggatcctgggtgcacacagcaaagcctctttggaggctgaatggggtcccccgactctggctttcccccaggtatacatgttcctgg

SEQ ID NO: 33904 - RNA, 96 nt, synthetic construct
  source 1..96: mol_type = other RNA
tgggtagtgggatcctgggtgcacacagcaaagcctctttggaggctgaatggggtcccccgactctggctttcccccaggtttacatgttcctgg

SEQ ID NO: 33905 - RNA, 96 nt, synthetic construct
  source 1..96: mol_type = other RNA
tgggtagtgggatcctgggtgcacacagcaaagcctctttggaggctgaatggggtcccccgactctggctttcccccaggtctacatgttcctgg

SEQ ID NO: 33906 - RNA, 96 nt, synthetic construct
  source 1..96: mol_type = other RNA
tgggtagtgggatcctgggtgcacacagcaaagcctctttggaggctgaatggggtcccccgactctggctttcccccaggtgtacatgttcctgg

SEQ ID NO: 33907 - RNA, 96 nt, synthetic construct
  source 1..96: mol_type = other RNA
tgggtagtgggatcctgggtgcacacagcaaagcctctttggaggctgaatggggtcccccgactctggctttcccccaggtgtacatgtttctgg

SEQ ID NO: 33908 - RNA, 96 nt, synthetic construct
  source 1..96: mol_type = other RNA
tgggtagtgggatcctgggtgcacacagcaaagcctctttggaggctgaatggggtcccccgactctggctttcccccaggtatacatgtttctgg

SEQ ID NO: 33909 - RNA, 97 nt, synthetic construct
  source 1..97: mol_type = other RNA
gtgggtagtgggatcctgggtgcacacagcaaagcctctttggaggctgaatggggtcccccgactctggctttcccccaggtctacatgtttctgg

SEQ ID NO: 33910 - RNA, 97 nt, synthetic construct
  source 1..97: mol_type = other RNA
gtgggtagtgggatcctgggtgcacacagcaaagcctctttggaggctgaatggggtcccccgactctggctttcccccaggtatacatgtttctgg

SEQ ID NO: 33911 - RNA, 97 nt, synthetic construct
  source 1..97: mol_type = other RNA
gtgggtagtgggatcctgggtgcacacagcaaagcctctttggaggctgaatggggtcccccgactctggctttcccccaggtctacatgttcctgg

SEQ ID NO: 33912 - RNA, 97 nt, synthetic construct
  source 1..97: mol_type = other RNA
gtgggtagtgggatcctgggtgcacacagcaaagcctctttggaggctgaatggggtcccccgactctggctttcccccaggtatacatgttcctgg

SEQ ID NO: 33913 - RNA, 97 nt, synthetic construct
  source 1..97: mol_type = other RNA
gtgggtagtgggatcctgggtgcacacagcaaagcctctttggaggctgaatggggtcccccgactctggctttcccccaggtttacatgttcctgg

SEQ ID NO: 33914 - RNA, 97 nt, synthetic construct
  source 1..97: mol_type = other RNA
gtgggtagtgggatcctgggtgcacacagcaaagcctctttggaggctgaatggggtcccccgactctggctttcccccaggtgtacatgtttctgg

SEQ ID NO: 33915 - RNA, 97 nt, synthetic construct
  source 1..97: mol_type = other RNA
gtgggtagtgggatcctgggtgcacacagcaaagcctctttggaggctgaatggggtcccccgactctggctttcccccaggtttacatgtttctgg

SEQ ID NO: 33916 - RNA, 97 nt, synthetic construct
  source 1..97: mol_type = other RNA
gtgggtagtgggatcctgggtgcacacagcaaagcctctttggaggctgaatggggtcccccgactctggctttcccccaggtgtacatgttcctgg

SEQ ID NO: 33917 - RNA, 98 nt, synthetic construct
  source 1..98: mol_type = other RNA
agtgggtagtgggatcctgggtgcacacagcaaagcctctttggaggctgaatggggtcccccgactctggctttcccccaggtatacatgtttctgg

SEQ ID NO: 33918 - RNA, 98 nt, synthetic construct
  source 1..98: mol_type = other RNA
agtgggtagtgggatcctgggtgcacacagcaaagcctctttggaggctgaatggggtcccccgactctggctttcccccaggtctacatgtttctgg

SEQ ID NO: 33919 - RNA, 98 nt, synthetic construct
  source 1..98: mol_type = other RNA
agtgggtagtgggatcctgggtgcacacagcaaagcctctttggaggctgaatggggtcccccgactctggctttcccccaggtgtacatgtttctgg

SEQ ID NO: 33920 - RNA, 98 nt, synthetic construct
  source 1..98: mol_type = other RNA
agtgggtagtgggatcctgggtgcacacagcaaagcctctttggaggctgaatggggtcccccgactctggctttcccccaggtgtacatgttcctgg

SEQ ID NO: 33921 - RNA, 98 nt, synthetic construct
  source 1..98: mol_type = other RNA
agtgggtagtgggatcctgggtgcacacagcaaagcctctttggaggctgaatggggtcccccgactctggctttcccccaggtttacatgtttctgg

SEQ ID NO: 33922 - RNA, 98 nt, synthetic construct
  source 1..98: mol_type = other RNA
agtgggtagtgggatcctgggtgcacacagcaaagcctctttggaggctgaatggggtcccccgactctggctttcccccaggtatacatgttcctgg

SEQ ID NO: 33923 - RNA, 98 nt, synthetic construct
  source 1..98: mol_type = other RNA
agtgggtagtgggatcctgggtgcacacagcaaagcctctttggaggctgaatggggtcccccgactctggctttcccccaggtctacatgttcctgg

SEQ ID NO: 33924 - RNA, 98 nt, synthetic construct
  source 1..98: mol_type = other RNA
agtgggtagtgggatcctgggtgcacacagcaaagcctctttggaggctgaatggggtcccccgactctggctttcccccaggtttacatgttcctgg

SEQ ID NO: 33925 - RNA, 99 nt, synthetic construct
  source 1..99: mol_type = other RNA
cagtgggtagtgggatcctgggtgcacacagcaaagcctctttggaggctgaatggggtcccccgactctggctttcccccaggtttacatgttcctgg

SEQ ID NO: 33926 - RNA, 99 nt, synthetic construct
  source 1..99: mol_type = other RNA
cagtgggtagtgggatcctgggtgcacacagcaaagcctctttggaggctgaatggggtcccccgactctggctttcccccaggtatacatgtttctgg

SEQ ID NO: 33927 - RNA, 99 nt, synthetic construct
  source 1..99: mol_type = other RNA
cagtgggtagtgggatcctgggtgcacacagcaaagcctctttggaggctgaatggggtcccccgactctggctttcccccaggtgtacatgtttctgg

SEQ ID NO: 33928 - RNA, 99 nt, synthetic construct
  source 1..99: mol_type = other RNA
cagtgggtagtgggatcctgggtgcacacagcaaagcctctttggaggctgaatggggtcccccgactctggctttcccccaggtttacatgtttctgg

SEQ ID NO: 33929 - RNA, 99 nt, synthetic construct
  source 1..99: mol_type = other RNA
cagtgggtagtgggatcctgggtgcacacagcaaagcctctttggaggctgaatggggtcccccgactctggctttcccccaggtctacatgtttctgg

SEQ ID NO: 33930 - RNA, 99 nt, synthetic construct
  source 1..99: mol_type = other RNA
cagtgggtagtgggatcctgggtgcacacagcaaagcctctttggaggctgaatggggtcccccgactctggctttcccccaggtctacatgttcctgg

SEQ ID NO: 33931 - RNA, 99 nt, synthetic construct
  source 1..99: mol_type = other RNA
cagtgggtagtgggatcctgggtgcacacagcaaagcctctttggaggctgaatggggtcccccgactctggctttcccccaggtgtacatgttcctgg

SEQ ID NO: 33932 - RNA, 99 nt, synthetic construct
  source 1..99: mol_type = other RNA
cagtgggtagtgggatcctgggtgcacacagcaaagcctctttggaggctgaatggggtcccccgactctggctttcccccaggtatacatgttcctgg

SEQ ID NO: 33933 - RNA, 100 nt, synthetic construct
  source 1..100: mol_type = other RNA
ccagtgggtagtgggatcctgggtgcacacagcaaagcctctttggaggctgaatggggtcccccgactctggctttcccccaggtgtacatgttcctgg

SEQ ID NO: 33934 - RNA, 100 nt, synthetic construct
  source 1..100: mol_type = other RNA
ccagtgggtagtgggatcctgggtgcacacagcaaagcctctttggaggctgaatggggtcccccgactctggctttcccccaggtgtacatgtttctgg

SEQ ID NO: 33935 - RNA, 100 nt, synthetic construct
  source 1..100: mol_type = other RNA
ccagtgggtagtgggatcctgggtgcacacagcaaagcctctttggaggctgaatggggtcccccgactctggctttcccccaggtttacatgttcctgg

SEQ ID NO: 33936 - RNA, 100 nt, synthetic construct
  source 1..100: mol_type = other RNA
ccagtgggtagtgggatcctgggtgcacacagcaaagcctctttggaggctgaatggggtcccccgactctggctttcccccaggtctacatgtttctgg

SEQ ID NO: 33937 - RNA, 100 nt, synthetic construct
  source 1..100: mol_type = other RNA
ccagtgggtagtgggatcctgggtgcacacagcaaagcctctttggaggctgaatggggtcccccgactctggctttcccccaggtttacatgtttctgg

SEQ ID NO: 33938 - RNA, 100 nt, synthetic construct
  source 1..100: mol_type = other RNA
ccagtgggtagtgggatcctgggtgcacacagcaaagcctctttggaggctgaatggggtcccccgactctggctttcccccaggtctacatgttcctgg

SEQ ID NO: 33939 - RNA, 100 nt, synthetic construct
  source 1..100: mol_type = other RNA
ccagtgggtagtgggatcctgggtgcacacagcaaagcctctttggaggctgaatggggtcccccgactctggctttcccccaggtatacatgttcctgg

SEQ ID NO: 33940 - RNA, 100 nt, synthetic construct
  source 1..100: mol_type = other RNA
ccagtgggtagtgggatcctgggtgcacacagcaaagcctctttggaggctgaatggggtcccccgactctggctttcccccaggtatacatgtttctgg

SEQ ID NO: 33941 - RNA, 101 nt, synthetic construct
  source 1..101: mol_type = other RNA
tccagtgggtagtgggatcctgggtgcacacagcaaagcctctttggaggctgaatggggtcccccgactctggctttcccccaggtatacatgtttctgg

SEQ ID NO: 33942 - RNA, 101 nt, synthetic construct
  source 1..101: mol_type = other RNA
tccagtgggtagtgggatcctgggtgcacacagcaaagcctctttggaggctgaatggggtcccccgactctggctttcccccaggtctacatgttcctgg

SEQ ID NO: 33943 - RNA, 101 nt, synthetic construct
  source 1..101: mol_type = other RNA
tccagtgggtagtgggatcctgggtgcacacagcaaagcctctttggaggctgaatggggtcccccgactctggctttcccccaggtctacatgtttctgg

SEQ ID NO: 33944 - RNA, 101 nt, synthetic construct
  source 1..101: mol_type = other RNA
tccagtgggtagtgggatcctgggtgcacacagcaaagcctctttggaggctgaatggggtcccccgactctggctttcccccaggtatacatgttcctgg

SEQ ID NO: 33945 - RNA, 101 nt, synthetic construct
  source 1..101: mol_type = other RNA
tccagtgggtagtgggatcctgggtgcacacagcaaagcctctttggaggctgaatggggtcccccgactctggctttcccccaggtttacatgttcctgg

SEQ ID NO: 33946 - RNA, 101 nt, synthetic construct
  source 1..101: mol_type = other RNA
tccagtgggtagtgggatcctgggtgcacacagcaaagcctctttggaggctgaatggggtcccccgactctggctttcccccaggtttacatgtttctgg

SEQ ID NO: 33947 - RNA, 101 nt, synthetic construct
  source 1..101: mol_type = other RNA
tccagtgggtagtgggatcctgggtgcacacagcaaagcctctttggaggctgaatggggtcccccgactctggctttcccccaggtgtacatgttcctgg

SEQ ID NO: 33948 - RNA, 101 nt, synthetic construct
  source 1..101: mol_type = other RNA
tccagtgggtagtgggatcctgggtgcacacagcaaagcctctttggaggctgaatggggtcccccgactctggctttcccccaggtgtacatgtttctgg

SEQ ID NO: 33949 - RNA, 102 nt, synthetic construct
  source 1..102: mol_type = other RNA
ctccagtgggtagtgggatcctgggtgcacacagcaaagcctctttggaggctgaatggggtcccccgactctggctttcccccaggtatacatgttcctgg

SEQ ID NO: 33950 - RNA, 102 nt, synthetic construct
  source 1..102: mol_type = other RNA
ctccagtgggtagtgggatcctgggtgcacacagcaaagcctctttggaggctgaatggggtcccccgactctggctttcccccaggtatacatgtttctgg

SEQ ID NO: 33951 - RNA, 102 nt, synthetic construct
  source 1..102: mol_type = other RNA
ctccagtgggtagtgggatcctgggtgcacacagcaaagcctctttggaggctgaatggggtcccccgactctggctttcccccaggtctacatgttcctgg

SEQ ID NO: 33952 - RNA, 102 nt, synthetic construct
  source 1..102: mol_type = other RNA
ctccagtgggtagtgggatcctgggtgcacacagcaaagcctctttggaggctgaatggggtcccccgactctggctttcccccaggtgtacatgttcctgg

SEQ ID NO: 33953 - RNA, 102 nt, synthetic construct
  source 1..102: mol_type = other RNA
ctccagtgggtagtgggatcctgggtgcacacagcaaagcctctttggaggctgaatggggtcccccgactctggctttcccccaggtgtacatgtttctgg

SEQ ID NO: 33954 - RNA, 102 nt, synthetic construct
  source 1..102: mol_type = other RNA
ctccagtgggtagtgggatcctgggtgcacacagcaaagcctctttggaggctgaatggggtcccccgactctggctttcccccaggtttacatgttcctgg

SEQ ID NO: 33955 - RNA, 102 nt, synthetic construct
  source 1..102: mol_type = other RNA
ctccagtgggtagtgggatcctgggtgcacacagcaaagcctctttggaggctgaatggggtcccccgactctggctttcccccaggtctacatgtttctgg

SEQ ID NO: 33956 - RNA, 102 nt, synthetic construct
  source 1..102: mol_type = other RNA
ctccagtgggtagtgggatcctgggtgcacacagcaaagcctctttggaggctgaatggggtcccccgactctggctttcccccaggtttacatgtttctgg

SEQ ID NO: 33957 - RNA, 103 nt, synthetic construct
  source 1..103: mol_type = other RNA
cctccagtgggtagtgggatcctgggtgcacacagcaaagcctctttggaggctgaatggggtcccccgactctggctttcccccaggtgtacatgttcctgg

SEQ ID NO: 33958 - RNA, 103 nt, synthetic construct
  source 1..103: mol_type = other RNA
cctccagtgggtagtgggatcctgggtgcacacagcaaagcctctttggaggctgaatggggtcccccgactctggctttcccccaggtctacatgtttctgg

SEQ ID NO: 33959 - RNA, 103 nt, synthetic construct
  source 1..103: mol_type = other RNA
cctccagtgggtagtgggatcctgggtgcacacagcaaagcctctttggaggctgaatggggtcccccgactctggctttcccccaggtatacatgtttctgg

SEQ ID NO: 33960 - RNA, 103 nt, synthetic construct
  source 1..103: mol_type = other RNA
cctccagtgggtagtgggatcctgggtgcacacagcaaagcctctttggaggctgaatggggtcccccgactctggctttcccccaggtctacatgttcctgg

SEQ ID NO: 33961 - RNA, 103 nt, synthetic construct
  source 1..103: mol_type = other RNA
cctccagtgggtagtgggatcctgggtgcacacagcaaagcctctttggaggctgaatggggtcccccgactctggctttcccccaggtgtacatgtttctgg

SEQ ID NO: 33962 - RNA, 103 nt, synthetic construct
  source 1..103: mol_type = other RNA
cctccagtgggtagtgggatcctgggtgcacacagcaaagcctctttggaggctgaatggggtcccccgactctggctttcccccaggtatacatgttcctgg

SEQ ID NO: 33963 - RNA, 103 nt, synthetic construct
  source 1..103: mol_type = other RNA
cctccagtgggtagtgggatcctgggtgcacacagcaaagcctctttggaggctgaatggggtcccccgactctggctttcccccaggtttacatgttcctgg

SEQ ID NO: 33964 - RNA, 103 nt, synthetic construct
  source 1..103: mol_type = other RNA
cctccagtgggtagtgggatcctgggtgcacacagcaaagcctctttggaggctgaatggggtcccccgactctggctttcccccaggtttacatgtttctgg

SEQ ID NO: 33965 - RNA, 20 nt, synthetic construct
  source 1..20: mol_type = other RNA
ccaggtatacatgtttctgg

SEQ ID NO: 33966 - RNA, 20 nt, synthetic construct
  source 1..20: mol_type = other RNA
ccaggtctacatgtttctgg

SEQ ID NO: 33967 - RNA, 20 nt, synthetic construct
  source 1..20: mol_type = other RNA
ccaggtgtacatgtttctgg

SEQ ID NO: 33968 - RNA, 20 nt, synthetic construct
  source 1..20: mol_type = other RNA
ccaggtttacatgtttctgg

SEQ ID NO: 33969 - RNA, 20 nt, synthetic construct
  source 1..20: mol_type = other RNA
ccccaggtttacatgtttct

SEQ ID NO: 33970 - RNA, 20 nt, synthetic construct
  source 1..20: mol_type = other RNA
ccccaggtatacatgtttct

SEQ ID NO: 33971 - RNA, 20 nt, synthetic construct
  source 1..20: mol_type = other RNA
ccccaggtctacatgtttct

SEQ ID NO: 33972 - RNA, 20 nt, synthetic construct
  source 1..20: mol_type = other RNA
ccccaggtgtacatgtttct

SEQ ID NO: 33973 - RNA, 128 nt, synthetic construct
  source 1..128: mol_type = other RNA
caggtcctgccatttcaccagttttagagctagaaatagcaagttaaaataaggctagtccgttatcaacttgaaaaagtggcaccgagtcggtgctcccccaggtgtacatgttcctggtgaaatgg

SEQ ID NO: 33974 - RNA, 129 nt, synthetic construct
  source 1..129: mol_type = other RNA
gcaggtcctgccatttcaccagttttagagctagaaatagcaagttaaaataaggctagtccgttatcaacttgaaaaagtggcaccgagtcggtgctcccccaggtgtacatgttcctggtgaaatgg

SEQ ID NO: 33975 - RNA, 130 nt, synthetic construct
  source 1..130: mol_type = other RNA
caggtcctgccatttcaccagttttagagctagaaatagcaagttaaaataaggctagtccgttatcaacttgaaaaagtggcaccgagtcggtgctcccccaggtgtacatgttcctggtgaaatggca

SEQ ID NO: 33976 - RNA, 130 nt, synthetic construct
  source 1..130: mol_type = other RNA
caggtcctgccatttcaccagttttagagctagaaatagcaagttaaaataaggctagtccgttatcaacttgaaaaagtggcaccgagtcggtgctttcccccaggtgtacatgttcctggtgaaatgg

SEQ ID NO: 33977 - RNA, 131 nt, synthetic construct
  source 1..131: mol_type = other RNA
gcaggtcctgccatttcaccagttttagagctagaaatagcaagttaaaataaggctagtccgttatcaacttgaaaaagtggcaccgagtcggtgctcccccaggtgtacatgttcctggtgaaatggca

SEQ ID NO: 33978 - RNA, 131 nt, synthetic construct
  source 1..131: mol_type = other RNA
gcaggtcctgccatttcaccagttttagagctagaaatagcaagttaaaataaggctagtccgttatcaacttgaaaaagtggcaccgagtcggtgctttcccccaggtgtacatgttcctggtgaaatgg

SEQ ID NO: 33979 - RNA, 132 nt, synthetic construct
  source 1..132: mol_type = other RNA
caggtcctgccatttcaccagttttagagctagaaatagcaagttaaaataaggctagtccgttatcaacttgaaaaagtggcaccgagtcggtgctttcccccaggtgtacatgttcctggtgaaatggca

SEQ ID NO: 33980 - RNA, 132 nt, synthetic construct
  source 1..132: mol_type = other RNA
caggtcctgccatttcaccagttttagagctagaaatagcaagttaaaataaggctagtccgttatcaacttgaaaaagtggcaccgagtcggtgcgctttcccccaggtgtacatgttcctggtgaaatgg

SEQ ID NO: 33981 - RNA, 132 nt, synthetic construct
  source 1..132: mol_type = other RNA
caggtcctgccatttcaccagttttagagctagaaatagcaagttaaaataaggctagtccgttatcaacttgaaaaagtggcaccgagtcggtgctcccccaggtgtacatgttcctggtgaaatggtttt

SEQ ID NO: 33982 - RNA, 132 nt, synthetic construct
  source 1..132: mol_type = other RNA
caggtcctgccatttcaccagttttagagctagaaatagcaagttaaaataaggctagtccgttatcaacttgaaaaagtggcaccgagtcggtgctcccccaggtgtacatgttcctggtgaaatggcagg

SEQ ID NO: 33983 - RNA, 133 nt, synthetic construct
  source 1..133: mol_type = other RNA
gcaggtcctgccatttcaccagttttagagctagaaatagcaagttaaaataaggctagtccgttatcaacttgaaaaagtggcaccgagtcggtgcgctttcccccaggtgtacatgttcctggtgaaatgg

SEQ ID NO: 33984 - RNA, 133 nt, synthetic construct
  source 1..133: mol_type = other RNA
gcaggtcctgccatttcaccagttttagagctagaaatagcaagttaaaataaggctagtccgttatcaacttgaaaaagtggcaccgagtcggtgctttcccccaggtgtacatgttcctggtgaaatggca

SEQ ID NO: 33985 - RNA, 133 nt, synthetic construct
  source 1..133: mol_type = other RNA
gcaggtcctgccatttcaccagttttagagctagaaatagcaagttaaaataaggctagtccgttatcaacttgaaaaagtggcaccgagtcggtgctcccccaggtgtacatgttcctggtgaaatggcagg

SEQ ID NO: 33986 - RNA, 134 nt, synthetic construct
  source 1..134: mol_type = other RNA
caggtcctgccatttcaccagttttagagctagaaatagcaagttaaaataaggctagtccgttatcaacttgaaaaagtggcaccgagtcggtgctttcccccaggtgtacatgttcctggtgaaatggtttt

SEQ ID NO: 33987 - RNA, 134 nt, synthetic construct
  source 1..134: mol_type = other RNA
caggtcctgccatttcaccagttttagagctagaaatagcaagttaaaataaggctagtccgttatcaacttgaaaaagtggcaccgagtcggtgctcccccaggtgtacatgttcctggtgaaatggcatttt

SEQ ID NO: 33988 - RNA, 134 nt, synthetic construct
  source 1..134: mol_type = other RNA
caggtcctgccatttcaccagttttagagctagaaatagcaagttaaaataaggctagtccgttatcaacttgaaaaagtggcaccgagtcggtgctcccccaggtgtacatgttcctggtgaaatggcaggac

SEQ ID NO: 33989 - RNA, 134 nt, synthetic construct
  source 1..134: mol_type = other RNA
caggtcctgccatttcaccagttttagagctagaaatagcaagttaaaataaggctagtccgttatcaacttgaaaaagtggcaccgagtcggtgctggctttcccccaggtgtacatgttcctggtgaaatgg

SEQ ID NO: 33990 - RNA, 134 nt, synthetic construct
  source 1..134: mol_type = other RNA
caggtcctgccatttcaccagttttagagctagaaatagcaagttaaaataaggctagtccgttatcaacttgaaaaagtggcaccgagtcggtgctttcccccaggtgtacatgttcctggtgaaatggcagg

SEQ ID NO: 33991 - RNA, 134 nt, synthetic construct
  source 1..134: mol_type = other RNA
caggtcctgccatttcaccagttttagagctagaaatagcaagttaaaataaggctagtccgttatcaacttgaaaaagtggcaccgagtcggtgcgctttcccccaggtgtacatgttcctggtgaaatggca

SEQ ID NO: 33992 - RNA, 135 nt, synthetic construct
  source 1..135: mol_type = other RNA
gcaggtcctgccatttcaccagttttagagctagaaatagcaagttaaaataaggctagtccgttatcaacttgaaaaagtggcaccgagtcggtgctcccccaggtgtacatgttcctggtgaaatggcaggac

SEQ ID NO: 33993 - RNA, 135 nt, synthetic construct
  source 1..135: mol_type = other RNA
gcaggtcctgccatttcaccagttttagagctagaaatagcaagttaaaataaggctagtccgttatcaacttgaaaaagtggcaccgagtcggtgctttcccccaggtgtacatgttcctggtgaaatggcagg

SEQ ID NO: 33994 - RNA, 135 nt, synthetic construct
  source 1..135: mol_type = other RNA
gcaggtcctgccatttcaccagttttagagctagaaatagcaagttaaaataaggctagtccgttatcaacttgaaaaagtggcaccgagtcggtgcgctttcccccaggtgtacatgttcctggtgaaatggca

SEQ ID NO: 33995 - RNA, 135 nt, synthetic construct
  source 1..135: mol_type = other RNA
gcaggtcctgccatttcaccagttttagagctagaaatagcaagttaaaataaggctagtccgttatcaacttgaaaaagtggcaccgagtcggtgctggctttcccccaggtgtacatgttcctggtgaaatgg

SEQ ID NO: 33996 - RNA, 136 nt, synthetic construct
  source 1..136: mol_type = other RNA
caggtcctgccatttcaccagttttagagctagaaatagcaagttaaaataaggctagtccgttatcaacttgaaaaagtggcaccgagtcggtgcgctttcccccaggtgtacatgttcctggtgaaatggtttt

SEQ ID NO: 33997 - RNA, 136 nt, synthetic construct
  source 1..136: mol_type = other RNA
caggtcctgccatttcaccagttttagagctagaaatagcaagttaaaataaggctagtccgttatcaacttgaaaaagtggcaccgagtcggtgctttcccccaggtgtacatgttcctggtgaaatggcatttt

SEQ ID NO: 33998 - RNA, 136 nt, synthetic construct
  source 1..136: mol_type = other RNA
caggtcctgccatttcaccagttttagagctagaaatagcaagttaaaataaggctagtccgttatcaacttgaaaaagtggcaccgagtcggtgctttcccccaggtgtacatgttcctggtgaaatggcaggac

SEQ ID NO: 33999 - RNA, 136 nt, synthetic construct
  source 1..136: mol_type = other RNA
caggtcctgccatttcaccagttttagagctagaaatagcaagttaaaataaggctagtccgttatcaacttgaaaaagtggcaccgagtcggtgcgctttcccccaggtgtacatgttcctggtgaaatggcagg

SEQ ID NO: 34000 - RNA, 136 nt, synthetic construct
  source 1..136: mol_type = other RNA
caggtcctgccatttcaccagttttagagctagaaatagcaagttaaaataaggctagtccgttatcaacttgaaaaagtggcaccgagtcggtgctcccccaggtgtacatgttcctggtgaaatggcaggtttt

SEQ ID NO: 34001 - RNA, 136 nt, synthetic construct
  source 1..136: mol_type = other RNA
caggtcctgccatttcaccagttttagagctagaaatagcaagttaaaataaggctagtccgttatcaacttgaaaaagtggcaccgagtcggtgctggctttcccccaggtgtacatgttcctggtgaaatggca

SEQ ID NO: 34002 - RNA, 137 nt, synthetic construct
  source 1..137: mol_type = other RNA
gcaggtcctgccatttcaccagttttagagctagaaatagcaagttaaaataaggctagtccgttatcaacttgaaaaagtggcaccgagtcggtgctggctttcccccaggtgtacatgttcctggtgaaatggca

SEQ ID NO: 34003 - RNA, 137 nt, synthetic construct
  source 1..137: mol_type = other RNA
gcaggtcctgccatttcaccagttttagagctagaaatagcaagttaaaataaggctagtccgttatcaacttgaaaaagtggcaccgagtcggtgctttcccccaggtgtacatgttcctggtgaaatggcaggac

SEQ ID NO: 34004 - RNA, 137 nt, synthetic construct
  source 1..137: mol_type = other RNA
gcaggtcctgccatttcaccagttttagagctagaaatagcaagttaaaataaggctagtccgttatcaacttgaaaaagtggcaccgagtcggtgcgctttcccccaggtgtacatgttcctggtgaaatggcagg

SEQ ID NO: 34005 - RNA, 138 nt, synthetic construct
  source 1..138: mol_type = other RNA
caggtcctgccatttcaccagttttagagctagaaatagcaagttaaaataaggctagtccgttatcaacttgaaaaagtggcaccgagtcggtgctggctttcccccaggtgtacatgttcctggtgaaatggtttt

SEQ ID NO: 34006 - RNA, 138 nt, synthetic construct
  source 1..138: mol_type = other RNA
caggtcctgccatttcaccagttttagagctagaaatagcaagttaaaataaggctagtccgttatcaacttgaaaaagtggcaccgagtcggtgctcccccaggtgtacatgttcctggtgaaatggcaggactttt

SEQ ID NO: 34007 - RNA, 138 nt, synthetic construct
  source 1..138: mol_type = other RNA
caggtcctgccatttcaccagttttagagctagaaatagcaagttaaaataaggctagtccgttatcaacttgaaaaagtggcaccgagtcggtgctggctttcccccaggtgtacatgttcctggtgaaatggcagg

SEQ ID NO: 34008 - RNA, 138 nt, synthetic construct
  source 1..138: mol_type = other RNA
caggtcctgccatttcaccagttttagagctagaaatagcaagttaaaataaggctagtccgttatcaacttgaaaaagtggcaccgagtcggtgcgctttcccccaggtgtacatgttcctggtgaaatggcatttt

SEQ ID NO: 34009 - RNA, 138 nt, synthetic construct
  source 1..138: mol_type = other RNA
caggtcctgccatttcaccagttttagagctagaaatagcaagttaaaataaggctagtccgttatcaacttgaaaaagtggcaccgagtcggtgcgctttcccccaggtgtacatgttcctggtgaaatggcaggac

SEQ ID NO: 34010 - RNA, 138 nt, synthetic construct
  source 1..138: mol_type = other RNA
caggtcctgccatttcaccagttttagagctagaaatagcaagttaaaataaggctagtccgttatcaacttgaaaaagtggcaccgagtcggtgctttcccccaggtgtacatgttcctggtgaaatggcaggtttt

SEQ ID NO: 34011 - RNA, 139 nt, synthetic construct
  source 1..139: mol_type = other RNA
gcaggtcctgccatttcaccagttttagagctagaaatagcaagttaaaataaggctagtccgttatcaacttgaaaaagtggcaccgagtcggtgcgctttcccccaggtgtacatgttcctggtgaaatggcaggac

SEQ ID NO: 34012 - RNA, 139 nt, synthetic construct
  source 1..139: mol_type = other RNA
gcaggtcctgccatttcaccagttttagagctagaaatagcaagttaaaataaggctagtccgttatcaacttgaaaaagtggcaccgagtcggtgctggctttcccccaggtgtacatgttcctggtgaaatggcagg

SEQ ID NO: 34013 - RNA, 140 nt, synthetic construct
  source 1..140: mol_type = other RNA
caggtcctgccatttcaccagttttagagctagaaatagcaagttaaaataaggctagtccgttatcaacttgaaaaagtggcaccgagtcggtgctggctttcccccaggtgtacatgttcctggtgaaatggcatttt

SEQ ID NO: 34014 - RNA, 140 nt, synthetic construct
  source 1..140: mol_type = other RNA
caggtcctgccatttcaccagttttagagctagaaatagcaagttaaaataaggctagtccgttatcaacttgaaaaagtggcaccgagtcggtgcgctttcccccaggtgtacatgttcctggtgaaatggcaggtttt

SEQ ID NO: 34015 - RNA, 140 nt, synthetic construct
  source 1..140: mol_type = other RNA
caggtcctgccatttcaccagttttagagctagaaatagcaagttaaaataaggctagtccgttatcaacttgaaaaagtggcaccgagtcggtgctttcccccaggtgtacatgttcctggtgaaatggcaggactttt

SEQ ID NO: 34016 - RNA, 140 nt, synthetic construct
  source 1..140: mol_type = other RNA
caggtcctgccatttcaccagttttagagctagaaatagcaagttaaaataaggctagtccgttatcaacttgaaaaagtggcaccgagtcggtgctggctttcccccaggtgtacatgttcctggtgaaatggcaggac

SEQ ID NO: 34017 - RNA, 141 nt, synthetic construct
  source 1..141: mol_type = other RNA
gcaggtcctgccatttcaccagttttagagctagaaatagcaagttaaaataaggctagtccgttatcaacttgaaaaagtggcaccgagtcggtgctggctttcccccaggtgtacatgttcctggtgaaatggcaggac

SEQ ID NO: 34018 - RNA, 142 nt, synthetic construct
  source 1..142: mol_type = other RNA
caggtcctgccatttcaccagttttagagctagaaatagcaagttaaaataaggctagtccgttatcaacttgaaaaagtggcaccgagtcggtgcgctttcccccaggtgtacatgttcctggtgaaatggcaggactttt

SEQ ID NO: 34019 - RNA, 142 nt, synthetic construct
  source 1..142: mol_type = other RNA
caggtcctgccatttcaccagttttagagctagaaatagcaagttaaaataaggctagtccgttatcaacttgaaaaagtggcaccgagtcggtgctggctttcccccaggtgtacatgttcctggtgaaatggcaggtttt

SEQ ID NO: 34020 - RNA, 144 nt, synthetic construct
  source 1..144: mol_type = other RNA
caggtcctgccatttcaccagttttagagctagaaatagcaagttaaaataaggctagtccgttatcaacttgaaaaagtggcaccgagtcggtgctggctttcccccaggtgtacatgttcctggtgaaatggcaggactttt

SEQ ID NO: 34021 - RNA, 16 nt, synthetic construct
  source 1..16: mol_type = other RNA
aaagcctctttggagg

SEQ ID NO: 34022 - RNA, 17 nt, synthetic construct
  source 1..17: mol_type = other RNA
caaagcctctttggagg

SEQ ID NO: 34023 - RNA, 18 nt, synthetic construct
  source 1..18: mol_type = other RNA
gcaaagcctctttggagg

SEQ ID NO: 34024 - RNA, 19 nt, synthetic construct
  source 1..19: mol_type = other RNA
agcaaagcctctttggagg

SEQ ID NO: 34025 - RNA, 20 nt, synthetic construct
  source 1..20: mol_type = other RNA
cagcaaagcctctttggagg

SEQ ID NO: 34026 - RNA, 21 nt, synthetic construct
  source 1..21: mol_type = other RNA
acagcaaagcctctttggagg

SEQ ID NO: 34027 - RNA, 22 nt, synthetic construct
  source 1..22: mol_type = other RNA
cacagcaaagcctctttggagg

SEQ ID NO: 34028-34033 - skipped (6 entries)

SEQ ID NO: 34034 - RNA, 10 nt, synthetic construct
  source 1..10: mol_type = other RNA
ccaaagaggc

SEQ ID NO: 34035 - RNA, 11 nt, synthetic construct
  source 1..11: mol_type = other RNA
ccaaagaggct

SEQ ID NO: 34036 - RNA, 12 nt, synthetic construct
  source 1..12: mol_type = other RNA
ccaaagaggctt

SEQ ID NO: 34037 - RNA, 13 nt, synthetic construct
  source 1..13: mol_type = other RNA
ccaaagaggcttt

SEQ ID NO: 34038 - RNA, 14 nt, synthetic construct
  source 1..14: mol_type = other RNA
ccaaagaggctttg

SEQ ID NO: 34039 - RNA, 15 nt, synthetic construct
  source 1..15: mol_type = other RNA
ccaaagaggctttgc

SEQ ID NO: 34040 - RNA, 16 nt, synthetic construct
  source 1..16: mol_type = other RNA
ccaaagaggctttgct

SEQ ID NO: 34041 - RNA, 17 nt, synthetic construct
  source 1..17: mol_type = other RNA
ccaaagaggctttgctg

SEQ ID NO: 34042 - RNA, 18 nt, synthetic construct
  source 1..18: mol_type = other RNA
ccaaagaggctttgctgt

SEQ ID NO: 34043 - RNA, 19 nt, synthetic construct
  source 1..19: mol_type = other RNA
ccaaagaggctttgctgtg

SEQ ID NO: 34044 - RNA, 40 nt, synthetic construct
  source 1..40: mol_type = other RNA
acctgggggaaagccagagtcgggggaccccattcagcct

SEQ ID NO: 34045 - RNA, 41 nt, synthetic construct
  source 1..41: mol_type = other RNA
tacctgggggaaagccagagtcgggggaccccattcagcct

SEQ ID NO: 34046 - RNA, 41 nt, synthetic construct
  source 1..41: mol_type = other RNA
aacctgggggaaagccagagtcgggggaccccattcagcct

SEQ ID NO: 34047 - RNA, 41 nt, synthetic construct
  source 1..41: mol_type = other RNA
gacctgggggaaagccagagtcgggggaccccattcagcct

SEQ ID NO: 34048 - RNA, 41 nt, synthetic construct
  source 1..41: mol_type = other RNA
cacctgggggaaagccagagtcgggggaccccattcagcct

SEQ ID NO: 34049 - RNA, 42 nt, synthetic construct
  source 1..42: mol_type = other RNA
agacctgggggaaagccagagtcgggggaccccattcagcct

SEQ ID NO: 34050 - RNA, 42 nt, synthetic construct
  source 1..42: mol_type = other RNA
atacctgggggaaagccagagtcgggggaccccattcagcct

SEQ ID NO: 34051 - RNA, 42 nt, synthetic construct
  source 1..42: mol_type = other RNA
aaacctgggggaaagccagagtcgggggaccccattcagcct

SEQ ID NO: 34052 - RNA, 42 nt, synthetic construct
  source 1..42: mol_type = other RNA
acacctgggggaaagccagagtcgggggaccccattcagcct

SEQ ID NO: 34053 - RNA, 43 nt, synthetic construct
  source 1..43: mol_type = other RNA
tacacctgggggaaagccagagtcgggggaccccattcagcct

SEQ ID NO: 34054 - RNA, 43 nt, synthetic construct
  source 1..43: mol_type = other RNA
taaacctgggggaaagccagagtcgggggaccccattcagcct

SEQ ID NO: 34055 - RNA, 43 nt, synthetic construct
  source 1..43: mol_type = other RNA
tatacctgggggaaagccagagtcgggggaccccattcagcct

SEQ ID NO: 34056 - RNA, 43 nt, synthetic construct
  source 1..43: mol_type = other RNA
tagacctgggggaaagccagagtcgggggaccccattcagcct

SEQ ID NO: 34057 - RNA, 44 nt, synthetic construct
  source 1..44: mol_type = other RNA
gtagacctgggggaaagccagagtcgggggaccccattcagcct

SEQ ID NO: 34058 - RNA, 44 nt, synthetic construct
  source 1..44: mol_type = other RNA
gtaaacctgggggaaagccagagtcgggggaccccattcagcct

SEQ ID NO: 34059 - RNA, 44 nt, synthetic construct
  source 1..44: mol_type = other RNA
gtatacctgggggaaagccagagtcgggggaccccattcagcct

SEQ ID NO: 34060 - RNA, 44 nt, synthetic construct
  source 1..44: mol_type = other RNA
gtacacctgggggaaagccagagtcgggggaccccattcagcct

SEQ ID NO: 34061 - RNA, 45 nt, synthetic construct
  source 1..45: mol_type = other RNA
tgtatacctgggggaaagccagagtcgggggaccccattcagcct

SEQ ID NO: 34062 - RNA, 45 nt, synthetic construct
  source 1..45: mol_type = other RNA
tgtagacctgggggaaagccagagtcgggggaccccattcagcct

SEQ ID NO: 34063 - RNA, 45 nt, synthetic construct
  source 1..45: mol_type = other RNA
tgtacacctgggggaaagccagagtcgggggaccccattcagcct

SEQ ID NO: 34064 - RNA, 45 nt, synthetic construct
  source 1..45: mol_type = other RNA
tgtaaacctgggggaaagccagagtcgggggaccccattcagcct

SEQ ID NO: 34065 - RNA, 46 nt, synthetic construct
  source 1..46: mol_type = other RNA
atgtacacctgggggaaagccagagtcgggggaccccattcagcct

SEQ ID NO: 34066 - RNA, 46 nt, synthetic construct
  source 1..46: mol_type = other RNA
atgtaaacctgggggaaagccagagtcgggggaccccattcagcct

SEQ ID NO: 34067 - RNA, 46 nt, synthetic construct
  source 1..46: mol_type = other RNA
atgtagacctgggggaaagccagagtcgggggaccccattcagcct

SEQ ID NO: 34068 - RNA, 46 nt, synthetic construct
  source 1..46: mol_type = other RNA
atgtatacctgggggaaagccagagtcgggggaccccattcagcct

SEQ ID NO: 34069 - RNA, 47 nt, synthetic construct
  source 1..47: mol_type = other RNA
catgtacacctgggggaaagccagagtcgggggaccccattcagcct

SEQ ID NO: 34070 - RNA, 47 nt, synthetic construct
  source 1..47: mol_type = other RNA
catgtaaacctgggggaaagccagagtcgggggaccccattcagcct

SEQ ID NO: 34071 - RNA, 47 nt, synthetic construct
  source 1..47: mol_type = other RNA
catgtagacctgggggaaagccagagtcgggggaccccattcagcct

SEQ ID NO: 34072 - RNA, 47 nt, synthetic construct
  source 1..47: mol_type = other RNA
catgtatacctgggggaaagccagagtcgggggaccccattcagcct

SEQ ID NO: 34073 - RNA, 48 nt, synthetic construct
  source 1..48: mol_type = other RNA
acatgtatacctgggggaaagccagagtcgggggaccccattcagcct

SEQ ID NO: 34074 - RNA, 48 nt, synthetic construct
  source 1..48: mol_type = other RNA
acatgtagacctgggggaaagccagagtcgggggaccccattcagcct

SEQ ID NO: 34075 - RNA, 48 nt, synthetic construct
  source 1..48: mol_type = other RNA
acatgtaaacctgggggaaagccagagtcgggggaccccattcagcct

SEQ ID NO: 34076 - RNA, 48 nt, synthetic construct
  source 1..48: mol_type = other RNA
acatgtacacctgggggaaagccagagtcgggggaccccattcagcct

SEQ ID NO: 34077 - RNA, 49 nt, synthetic construct
  source 1..49: mol_type = other RNA
aacatgtacacctgggggaaagccagagtcgggggaccccattcagcct

SEQ ID NO: 34078 - RNA, 49 nt, synthetic construct
  source 1..49: mol_type = other RNA
aacatgtatacctgggggaaagccagagtcgggggaccccattcagcct

SEQ ID NO: 34079 - RNA, 49 nt, synthetic construct
  source 1..49: mol_type = other RNA
aacatgtagacctgggggaaagccagagtcgggggaccccattcagcct

SEQ ID NO: 34080 - RNA, 49 nt, synthetic construct
  source 1..49: mol_type = other RNA
aacatgtaaacctgggggaaagccagagtcgggggaccccattcagcct

SEQ ID NO: 34081 - RNA, 50 nt, synthetic construct
  source 1..50: mol_type = other RNA
gaacatgtatacctgggggaaagccagagtcgggggaccccattcagcct

SEQ ID NO: 34082 - RNA, 50 nt, synthetic construct
  source 1..50: mol_type = other RNA
gaacatgtagacctgggggaaagccagagtcgggggaccccattcagcct

SEQ ID NO: 34083 - RNA, 50 nt, synthetic construct
  source 1..50: mol_type = other RNA
gaacatgtacacctgggggaaagccagagtcgggggaccccattcagcct

SEQ ID NO: 34084 - RNA, 50 nt, synthetic construct
  source 1..50: mol_type = other RNA
gaacatgtaaacctgggggaaagccagagtcgggggaccccattcagcct

SEQ ID NO: 34085 - RNA, 51 nt, synthetic construct
  source 1..51: mol_type = other RNA
ggaacatgtaaacctgggggaaagccagagtcgggggaccccattcagcct

SEQ ID NO: 34086 - RNA, 51 nt, synthetic construct
  source 1..51: mol_type = other RNA
ggaacatgtatacctgggggaaagccagagtcgggggaccccattcagcct

SEQ ID NO: 34087 - RNA, 51 nt, synthetic construct
  source 1..51: mol_type = other RNA
ggaacatgtagacctgggggaaagccagagtcgggggaccccattcagcct

SEQ ID NO: 34088 - RNA, 51 nt, synthetic construct
  source 1..51: mol_type = other RNA
ggaacatgtacacctgggggaaagccagagtcgggggaccccattcagcct

SEQ ID NO: 34089 - RNA, 52 nt, synthetic construct
  source 1..52: mol_type = other RNA
aggaacatgtagacctgggggaaagccagagtcgggggaccccattcagcct

SEQ ID NO: 34090 - RNA, 52 nt, synthetic construct
  source 1..52: mol_type = other RNA
aggaacatgtatacctgggggaaagccagagtcgggggaccccattcagcct

SEQ ID NO: 34091 - RNA, 52 nt, synthetic construct
  source 1..52: mol_type = other RNA
aggaacatgtacacctgggggaaagccagagtcgggggaccccattcagcct

SEQ ID NO: 34092 - RNA, 52 nt, synthetic construct
  source 1..52: mol_type = other RNA
aggaacatgtaaacctgggggaaagccagagtcgggggaccccattcagcct

SEQ ID NO: 34093 - RNA, 53 nt, synthetic construct
  source 1..53: mol_type = other RNA
caggaacatgtacacctgggggaaagccagagtcgggggaccccattcagcct

SEQ ID NO: 34094 - RNA, 53 nt, synthetic construct
  source 1..53: mol_type = other RNA
caggaacatgtaaacctgggggaaagccagagtcgggggaccccattcagcct

SEQ ID NO: 34095 - RNA, 53 nt, synthetic construct
  source 1..53: mol_type = other RNA
caggaacatgtagacctgggggaaagccagagtcgggggaccccattcagcct

SEQ ID NO: 34096 - RNA, 53 nt, synthetic construct
  source 1..53: mol_type = other RNA
caggaacatgtatacctgggggaaagccagagtcgggggaccccattcagcct

SEQ ID NO: 34097 - RNA, 54 nt, synthetic construct
  source 1..54: mol_type = other RNA
ccaggaacatgtagacctgggggaaagccagagtcgggggaccccattcagcct

SEQ ID NO: 34098 - RNA, 54 nt, synthetic construct
  source 1..54: mol_type = other RNA
ccaggaacatgtacacctgggggaaagccagagtcgggggaccccattcagcct

SEQ ID NO: 34099 - RNA, 54 nt, synthetic construct
  source 1..54: mol_type = other RNA
ccaggaacatgtaaacctgggggaaagccagagtcgggggaccccattcagcct

SEQ ID NO: 34100 - RNA, 54 nt, synthetic construct
  source 1..54: mol_type = other RNA
ccaggaacatgtatacctgggggaaagccagagtcgggggaccccattcagcct

SEQ ID NO: 34101 - RNA, 55 nt, synthetic construct
  source 1..55: mol_type = other RNA
accaggaacatgtagacctgggggaaagccagagtcgggggaccccattcagcct

SEQ ID NO: 34102 - RNA, 55 nt, synthetic construct
  source 1..55: mol_type = other RNA
accaggaacatgtacacctgggggaaagccagagtcgggggaccccattcagcct

SEQ ID NO: 34103 - RNA, 55 nt, synthetic construct
  source 1..55: mol_type = other RNA
accaggaacatgtaaacctgggggaaagccagagtcgggggaccccattcagcct

SEQ ID NO: 34104 - RNA, 55 nt, synthetic construct
  source 1..55: mol_type = other RNA
accaggaacatgtatacctgggggaaagccagagtcgggggaccccattcagcct

SEQ ID NO: 34105 - RNA, 56 nt, synthetic construct
  source 1..56: mol_type = other RNA
caccaggaacatgtaaacctgggggaaagccagagtcgggggaccccattcagcct

SEQ ID NO: 34106 - RNA, 56 nt, synthetic construct
  source 1..56: mol_type = other RNA
caccaggaacatgtatacctgggggaaagccagagtcgggggaccccattcagcct

SEQ ID NO: 34107 - RNA, 56 nt, synthetic construct
  source 1..56: mol_type = other RNA
caccaggaacatgtacacctgggggaaagccagagtcgggggaccccattcagcct

SEQ ID NO: 34108 - RNA, 56 nt, synthetic construct
  source 1..56: mol_type = other RNA
caccaggaacatgtagacctgggggaaagccagagtcgggggaccccattcagcct

SEQ ID NO: 34109 - RNA, 57 nt, synthetic construct
  source 1..57: mol_type = other RNA
tcaccaggaacatgtatacctgggggaaagccagagtcgggggaccccattcagcct

SEQ ID NO: 34110 - RNA, 57 nt, synthetic construct
  source 1..57: mol_type = other RNA
tcaccaggaacatgtagacctgggggaaagccagagtcgggggaccccattcagcct

SEQ ID NO: 34111 - RNA, 57 nt, synthetic construct
  source 1..57: mol_type = other RNA
tcaccaggaacatgtacacctgggggaaagccagagtcgggggaccccattcagcct

SEQ ID NO: 34112 - RNA, 57 nt, synthetic construct
  source 1..57: mol_type = other RNA
tcaccaggaacatgtaaacctgggggaaagccagagtcgggggaccccattcagcct

SEQ ID NO: 34113 - RNA, 58 nt, synthetic construct
  source 1..58: mol_type = other RNA
ttcaccaggaacatgtacacctgggggaaagccagagtcgggggaccccattcagcct

SEQ ID NO: 34114 - RNA, 58 nt, synthetic construct
  source 1..58: mol_type = other RNA
ttcaccaggaacatgtatacctgggggaaagccagagtcgggggaccccattcagcct

SEQ ID NO: 34115 - RNA, 58 nt, synthetic construct
  source 1..58: mol_type = other RNA
ttcaccaggaacatgtagacctgggggaaagccagagtcgggggaccccattcagcct

SEQ ID NO: 34116 - RNA, 58 nt, synthetic construct
  source 1..58: mol_type = other RNA
ttcaccaggaacatgtaaacctgggggaaagccagagtcgggggaccccattcagcct

SEQ ID NO: 34117 - RNA, 59 nt, synthetic construct
  source 1..59: mol_type = other RNA
tttcaccaggaacatgtagacctgggggaaagccagagtcgggggaccccattcagcct

SEQ ID NO: 34118 - RNA, 59 nt, synthetic construct
  source 1..59: mol_type = other RNA
tttcaccaggaacatgtaaacctgggggaaagccagagtcgggggaccccattcagcct

SEQ ID NO: 34119 - RNA, 59 nt, synthetic construct
  source 1..59: mol_type = other RNA
tttcaccaggaacatgtatacctgggggaaagccagagtcgggggaccccattcagcct

SEQ ID NO: 34120 - RNA, 59 nt, synthetic construct
  source 1..59: mol_type = other RNA
tttcaccaggaacatgtacacctgggggaaagccagagtcgggggaccccattcagcct

SEQ ID NO: 34121 - RNA, 60 nt, synthetic construct
  source 1..60: mol_type = other RNA
atttcaccaggaacatgtatacctgggggaaagccagagtcgggggaccccattcagcct

SEQ ID NO: 34122 - RNA, 60 nt, synthetic construct
  source 1..60: mol_type = other RNA
atttcaccaggaacatgtagacctgggggaaagccagagtcgggggaccccattcagcct

SEQ ID NO: 34123 - RNA, 60 nt, synthetic construct
  source 1..60: mol_type = other RNA
atttcaccaggaacatgtaaacctgggggaaagccagagtcgggggaccccattcagcct

SEQ ID NO: 34124 - RNA, 60 nt, synthetic construct
  source 1..60: mol_type = other RNA
atttcaccaggaacatgtacacctgggggaaagccagagtcgggggaccccattcagcct

SEQ ID NO: 34125 - RNA, 61 nt, synthetic construct
  source 1..61: mol_type = other RNA
catttcaccaggaacatgtaaacctgggggaaagccagagtcgggggaccccattcagcct

SEQ ID NO: 34126 - RNA, 61 nt, synthetic construct
  source 1..61: mol_type = other RNA
catttcaccaggaacatgtatacctgggggaaagccagagtcgggggaccccattcagcct

SEQ ID NO: 34127 - RNA, 61 nt, synthetic construct
  source 1..61: mol_type = other RNA
catttcaccaggaacatgtagacctgggggaaagccagagtcgggggaccccattcagcct

SEQ ID NO: 34128 - RNA, 61 nt, synthetic construct
  source 1..61: mol_type = other RNA
catttcaccaggaacatgtacacctgggggaaagccagagtcgggggaccccattcagcct

SEQ ID NO: 34129 - RNA, 62 nt, synthetic construct
  source 1..62: mol_type = other RNA
ccatttcaccaggaacatgtatacctgggggaaagccagagtcgggggaccccattcagcct

SEQ ID NO: 34130 - RNA, 62 nt, synthetic construct
  source 1..62: mol_type = other RNA
ccatttcaccaggaacatgtacacctgggggaaagccagagtcgggggaccccattcagcct

SEQ ID NO: 34131 - RNA, 62 nt, synthetic construct
  source 1..62: mol_type = other RNA
ccatttcaccaggaacatgtaaacctgggggaaagccagagtcgggggaccccattcagcct

SEQ ID NO: 34132 - RNA, 62 nt, synthetic construct
  source 1..62: mol_type = other RNA
ccatttcaccaggaacatgtagacctgggggaaagccagagtcgggggaccccattcagcct

SEQ ID NO: 34133 - RNA, 63 nt, synthetic construct
  source 1..63: mol_type = other RNA
gccatttcaccaggaacatgtacacctgggggaaagccagagtcgggggaccccattcagcct

SEQ ID NO: 34134 - RNA, 63 nt, synthetic construct
  source 1..63: mol_type = other RNA
gccatttcaccaggaacatgtatacctgggggaaagccagagtcgggggaccccattcagcct

SEQ ID NO: 34135 - RNA, 63 nt, synthetic construct
  source 1..63: mol_type = other RNA
gccatttcaccaggaacatgtaaacctgggggaaagccagagtcgggggaccccattcagcct

SEQ ID NO: 34136 - RNA, 63 nt, synthetic construct
  source 1..63: mol_type = other RNA
gccatttcaccaggaacatgtagacctgggggaaagccagagtcgggggaccccattcagcct

SEQ ID NO: 34137 - RNA, 64 nt, synthetic construct
  source 1..64: mol_type = other RNA
tgccatttcaccaggaacatgtagacctgggggaaagccagagtcgggggaccccattcagcct

SEQ ID NO: 34138 - RNA, 64 nt, synthetic construct
  source 1..64: mol_type = other RNA
tgccatttcaccaggaacatgtatacctgggggaaagccagagtcgggggaccccattcagcct

SEQ ID NO: 34139 - RNA, 64 nt, synthetic construct
  source 1..64: mol_type = other RNA
tgccatttcaccaggaacatgtaaacctgggggaaagccagagtcgggggaccccattcagcct

SEQ ID NO: 34140 - RNA, 64 nt, synthetic construct
  source 1..64: mol_type = other RNA
tgccatttcaccaggaacatgtacacctgggggaaagccagagtcgggggaccccattcagcct

SEQ ID NO: 34141 - RNA, 65 nt, synthetic construct
  source 1..65: mol_type = other RNA
ctgccatttcaccaggaacatgtagacctgggggaaagccagagtcgggggaccccattcagcct

SEQ ID NO: 34142 - RNA, 65 nt, synthetic construct
  source 1..65: mol_type = other RNA
ctgccatttcaccaggaacatgtatacctgggggaaagccagagtcgggggaccccattcagcct

SEQ ID NO: 34143 - RNA, 65 nt, synthetic construct
  source 1..65: mol_type = other RNA
ctgccatttcaccaggaacatgtaaacctgggggaaagccagagtcgggggaccccattcagcct

SEQ ID NO: 34144 - RNA, 65 nt, synthetic construct
  source 1..65: mol_type = other RNA
ctgccatttcaccaggaacatgtacacctgggggaaagccagagtcgggggaccccattcagcct

SEQ ID NO: 34145 - RNA, 66 nt, synthetic construct
  source 1..66: mol_type = other RNA
cctgccatttcaccaggaacatgtaaacctgggggaaagccagagtcgggggaccccattcagcct

SEQ ID NO: 34146 - RNA, 66 nt, synthetic construct
  source 1..66: mol_type = other RNA
cctgccatttcaccaggaacatgtacacctgggggaaagccagagtcgggggaccccattcagcct

SEQ ID NO: 34147 - RNA, 66 nt, synthetic construct
  source 1..66: mol_type = other RNA
cctgccatttcaccaggaacatgtagacctgggggaaagccagagtcgggggaccccattcagcct

SEQ ID NO: 34148 - RNA, 66 nt, synthetic construct
  source 1..66: mol_type = other RNA
cctgccatttcaccaggaacatgtatacctgggggaaagccagagtcgggggaccccattcagcct

SEQ ID NO: 34149 - RNA, 67 nt, synthetic construct
  source 1..67: mol_type = other RNA
tcctgccatttcaccaggaacatgtacacctgggggaaagccagagtcgggggaccccattcagcct

SEQ ID NO: 34150 - RNA, 67 nt, synthetic construct
  source 1..67: mol_type = other RNA
tcctgccatttcaccaggaacatgtagacctgggggaaagccagagtcgggggaccccattcagcct

SEQ ID NO: 34151 - RNA, 67 nt, synthetic construct
  source 1..67: mol_type = other RNA
tcctgccatttcaccaggaacatgtaaacctgggggaaagccagagtcgggggaccccattcagcct

SEQ ID NO: 34152 - RNA, 67 nt, synthetic construct
  source 1..67: mol_type = other RNA
tcctgccatttcaccaggaacatgtatacctgggggaaagccagagtcgggggaccccattcagcct

SEQ ID NO: 34153 - RNA, 68 nt, synthetic construct
  source 1..68: mol_type = other RNA
gtcctgccatttcaccaggaacatgtagacctgggggaaagccagagtcgggggaccccattcagcct

SEQ ID NO: 34154 - RNA, 68 nt, synthetic construct
  source 1..68: mol_type = other RNA
gtcctgccatttcaccaggaacatgtaaacctgggggaaagccagagtcgggggaccccattcagcct

SEQ ID NO: 34155 - RNA, 68 nt, synthetic construct
  source 1..68: mol_type = other RNA
gtcctgccatttcaccaggaacatgtatacctgggggaaagccagagtcgggggaccccattcagcct

SEQ ID NO: 34156 - RNA, 68 nt, synthetic construct
  source 1..68: mol_type = other RNA
gtcctgccatttcaccaggaacatgtacacctgggggaaagccagagtcgggggaccccattcagcct

SEQ ID NO: 34157 - RNA, 69 nt, synthetic construct
  source 1..69: mol_type = other RNA
ggtcctgccatttcaccaggaacatgtaaacctgggggaaagccagagtcgggggaccccattcagcct

SEQ ID NO: 34158 - RNA, 69 nt, synthetic construct
  source 1..69: mol_type = other RNA
ggtcctgccatttcaccaggaacatgtatacctgggggaaagccagagtcgggggaccccattcagcct

SEQ ID NO: 34159 - RNA, 69 nt, synthetic construct
  source 1..69: mol_type = other RNA
ggtcctgccatttcaccaggaacatgtagacctgggggaaagccagagtcgggggaccccattcagcct

SEQ ID NO: 34160 - RNA, 69 nt, synthetic construct
  source 1..69: mol_type = other RNA
ggtcctgccatttcaccaggaacatgtacacctgggggaaagccagagtcgggggaccccattcagcct

SEQ ID NO: 34161 - RNA, 70 nt, synthetic construct
  source 1..70: mol_type = other RNA
aggtcctgccatttcaccaggaacatgtagacctgggggaaagccagagtcgggggaccccattcagcct

SEQ ID NO: 34162 - RNA, 70 nt, synthetic construct
  source 1..70: mol_type = other RNA
aggtcctgccatttcaccaggaacatgtacacctgggggaaagccagagtcgggggaccccattcagcct

SEQ ID NO: 34163 - RNA, 70 nt, synthetic construct
  source 1..70: mol_type = other RNA
aggtcctgccatttcaccaggaacatgtaaacctgggggaaagccagagtcgggggaccccattcagcct

SEQ ID NO: 34164 - RNA, 70 nt, synthetic construct
  source 1..70: mol_type = other RNA
aggtcctgccatttcaccaggaacatgtatacctgggggaaagccagagtcgggggaccccattcagcct

SEQ ID NO: 34165 - RNA, 71 nt, synthetic construct
  source 1..71: mol_type = other RNA
caggtcctgccatttcaccaggaacatgtaaacctgggggaaagccagagtcgggggaccccattcagcct

SEQ ID NO: 34166 - RNA, 71 nt, synthetic construct
  source 1..71: mol_type = other RNA
caggtcctgccatttcaccaggaacatgtagacctgggggaaagccagagtcgggggaccccattcagcct

SEQ ID NO: 34167 - RNA, 71 nt, synthetic construct
  source 1..71: mol_type = other RNA
caggtcctgccatttcaccaggaacatgtacacctgggggaaagccagagtcgggggaccccattcagcct

SEQ ID NO: 34168 - RNA, 71 nt, synthetic construct
  source 1..71: mol_type = other RNA
caggtcctgccatttcaccaggaacatgtatacctgggggaaagccagagtcgggggaccccattcagcct

SEQ ID NO: 34169 - RNA, 72 nt, synthetic construct
  source 1..72: mol_type = other RNA
acaggtcctgccatttcaccaggaacatgtaaacctgggggaaagccagagtcgggggaccccattcagcct

SEQ ID NO: 34170 - RNA, 72 nt, synthetic construct
  source 1..72: mol_type = other RNA
acaggtcctgccatttcaccaggaacatgtacacctgggggaaagccagagtcgggggaccccattcagcct

SEQ ID NO: 34171 - RNA, 72 nt, synthetic construct
  source 1..72: mol_type = other RNA
acaggtcctgccatttcaccaggaacatgtagacctgggggaaagccagagtcgggggaccccattcagcct

SEQ ID NO: 34172 - RNA, 72 nt, synthetic construct
  source 1..72: mol_type = other RNA
acaggtcctgccatttcaccaggaacatgtatacctgggggaaagccagagtcgggggaccccattcagcct

SEQ ID NO: 34173 - RNA, 73 nt, synthetic construct
  source 1..73: mol_type = other RNA
gacaggtcctgccatttcaccaggaacatgtacacctgggggaaagccagagtcgggggaccccattcagcct

SEQ ID NO: 34174 - RNA, 73 nt, synthetic construct
  source 1..73: mol_type = other RNA
gacaggtcctgccatttcaccaggaacatgtaaacctgggggaaagccagagtcgggggaccccattcagcct

SEQ ID NO: 34175 - RNA, 73 nt, synthetic construct
  source 1..73: mol_type = other RNA
gacaggtcctgccatttcaccaggaacatgtatacctgggggaaagccagagtcgggggaccccattcagcct

SEQ ID NO: 34176 - RNA, 73 nt, synthetic construct
  source 1..73: mol_type = other RNA
gacaggtcctgccatttcaccaggaacatgtagacctgggggaaagccagagtcgggggaccccattcagcct

SEQ ID NO: 34177 - RNA, 74 nt, synthetic construct
  source 1..74: mol_type = other RNA
cgacaggtcctgccatttcaccaggaacatgtagacctgggggaaagccagagtcgggggaccccattcagcct

SEQ ID NO: 34178 - RNA, 74 nt, synthetic construct
  source 1..74: mol_type = other RNA
cgacaggtcctgccatttcaccaggaacatgtaaacctgggggaaagccagagtcgggggaccccattcagcct

SEQ ID NO: 34179 - RNA, 74 nt, synthetic construct
  source 1..74: mol_type = other RNA
cgacaggtcctgccatttcaccaggaacatgtacacctgggggaaagccagagtcgggggaccccattcagcct

SEQ ID NO: 34180 - RNA, 74 nt, synthetic construct
  source 1..74: mol_type = other RNA
cgacaggtcctgccatttcaccaggaacatgtatacctgggggaaagccagagtcgggggaccccattcagcct

SEQ ID NO: 34181 - RNA, 75 nt, synthetic construct
  source 1..75: mol_type = other RNA
ccgacaggtcctgccatttcaccaggaacatgtatacctgggggaaagccagagtcgggggaccccattcagcct

SEQ ID NO: 34182 - RNA, 75 nt, synthetic construct
  source 1..75: mol_type = other RNA
ccgacaggtcctgccatttcaccaggaacatgtaaacctgggggaaagccagagtcgggggaccccattcagcct

SEQ ID NO: 34183 - RNA, 75 nt, synthetic construct
  source 1..75: mol_type = other RNA
ccgacaggtcctgccatttcaccaggaacatgtacacctgggggaaagccagagtcgggggaccccattcagcct

SEQ ID NO: 34184 - RNA, 75 nt, synthetic construct
  source 1..75: mol_type = other RNA
ccgacaggtcctgccatttcaccaggaacatgtagacctgggggaaagccagagtcgggggaccccattcagcct

SEQ ID NO: 34185 - RNA, 76 nt, synthetic construct
  source 1..76: mol_type = other RNA
tccgacaggtcctgccatttcaccaggaacatgtagacctgggggaaagccagagtcgggggaccccattcagcct

SEQ ID NO: 34186 - RNA, 76 nt, synthetic construct
  source 1..76: mol_type = other RNA
tccgacaggtcctgccatttcaccaggaacatgtacacctgggggaaagccagagtcgggggaccccattcagcct

SEQ ID NO: 34187 - RNA, 76 nt, synthetic construct
  source 1..76: mol_type = other RNA
tccgacaggtcctgccatttcaccaggaacatgtaaacctgggggaaagccagagtcgggggaccccattcagcct

SEQ ID NO: 34188 - RNA, 76 nt, synthetic construct
  source 1..76: mol_type = other RNA
tccgacaggtcctgccatttcaccaggaacatgtatacctgggggaaagccagagtcgggggaccccattcagcct

SEQ ID NO: 34189 - RNA, 77 nt, synthetic construct
  source 1..77: mol_type = other RNA
ctccgacaggtcctgccatttcaccaggaacatgtacacctgggggaaagccagagtcgggggaccccattcagcct

SEQ ID NO: 34190 - RNA, 77 nt, synthetic construct
  source 1..77: mol_type = other RNA
ctccgacaggtcctgccatttcaccaggaacatgtaaacctgggggaaagccagagtcgggggaccccattcagcct

SEQ ID NO: 34191 - RNA, 77 nt, synthetic construct
  source 1..77: mol_type = other RNA
ctccgacaggtcctgccatttcaccaggaacatgtagacctgggggaaagccagagtcgggggaccccattcagcct

SEQ ID NO: 34192 - RNA, 77 nt, synthetic construct
  source 1..77: mol_type = other RNA
ctccgacaggtcctgccatttcaccaggaacatgtatacctgggggaaagccagagtcgggggaccccattcagcct

SEQ ID NO: 34193 - RNA, 78 nt, synthetic construct
  source 1..78: mol_type = other RNA
tctccgacaggtcctgccatttcaccaggaacatgtacacctgggggaaagccagagtcgggggaccccattcagcct

SEQ ID NO: 34194 - RNA, 78 nt, synthetic construct
  source 1..78: mol_type = other RNA
tctccgacaggtcctgccatttcaccaggaacatgtaaacctgggggaaagccagagtcgggggaccccattcagcct

SEQ ID NO: 34195 - RNA, 78 nt, synthetic construct
  source 1..78: mol_type = other RNA
tctccgacaggtcctgccatttcaccaggaacatgtatacctgggggaaagccagagtcgggggaccccattcagcct

SEQ ID NO: 34196 - RNA, 78 nt, synthetic construct
  source 1..78: mol_type = other RNA
tctccgacaggtcctgccatttcaccaggaacatgtagacctgggggaaagccagagtcgggggaccccattcagcct

SEQ ID NO: 34197 - RNA, 79 nt, synthetic construct
  source 1..79: mol_type = other RNA
ttctccgacaggtcctgccatttcaccaggaacatgtagacctgggggaaagccagagtcgggggaccccattcagcct

SEQ ID NO: 34198 - RNA, 79 nt, synthetic construct
  source 1..79: mol_type = other RNA
ttctccgacaggtcctgccatttcaccaggaacatgtacacctgggggaaagccagagtcgggggaccccattcagcct

SEQ ID NO: 34199 - RNA, 79 nt, synthetic construct
  source 1..79: mol_type = other RNA
ttctccgacaggtcctgccatttcaccaggaacatgtaaacctgggggaaagccagagtcgggggaccccattcagcct

SEQ ID NO: 34200 - RNA, 79 nt, synthetic construct
  source 1..79: mol_type = other RNA
ttctccgacaggtcctgccatttcaccaggaacatgtatacctgggggaaagccagagtcgggggaccccattcagcct

SEQ ID NO: 34201 - RNA, 80 nt, synthetic construct
  source 1..80: mol_type = other RNA
cttctccgacaggtcctgccatttcaccaggaacatgtatacctgggggaaagccagagtcgggggaccccattcagcct

SEQ ID NO: 34202 - RNA, 80 nt, synthetic construct
  source 1..80: mol_type = other RNA
cttctccgacaggtcctgccatttcaccaggaacatgtaaacctgggggaaagccagagtcgggggaccccattcagcct

SEQ ID NO: 34203 - RNA, 80 nt, synthetic construct
  source 1..80: mol_type = other RNA
cttctccgacaggtcctgccatttcaccaggaacatgtacacctgggggaaagccagagtcgggggaccccattcagcct

SEQ ID NO: 34204 - RNA, 80 nt, synthetic construct
  source 1..80: mol_type = other RNA
cttctccgacaggtcctgccatttcaccaggaacatgtagacctgggggaaagccagagtcgggggaccccattcagcct

SEQ ID NO: 34205 - RNA, 81 nt, synthetic construct
  source 1..81: mol_type = other RNA
ccttctccgacaggtcctgccatttcaccaggaacatgtacacctgggggaaagccagagtcgggggaccccattcagcct

SEQ ID NO: 34206 - RNA, 81 nt, synthetic construct
  source 1..81: mol_type = other RNA
ccttctccgacaggtcctgccatttcaccaggaacatgtatacctgggggaaagccagagtcgggggaccccattcagcct

SEQ ID NO: 34207 - RNA, 81 nt, synthetic construct
  source 1..81: mol_type = other RNA
ccttctccgacaggtcctgccatttcaccaggaacatgtagacctgggggaaagccagagtcgggggaccccattcagcct

SEQ ID NO: 34208 - RNA, 81 nt, synthetic construct
  source 1..81: mol_type = other RNA
ccttctccgacaggtcctgccatttcaccaggaacatgtaaacctgggggaaagccagagtcgggggaccccattcagcct

SEQ ID NO: 34209 - RNA, 82 nt, synthetic construct
  source 1..82: mol_type = other RNA
accttctccgacaggtcctgccatttcaccaggaacatgtagacctgggggaaagccagagtcgggggaccccattcagcct

SEQ ID NO: 34210 - RNA, 82 nt, synthetic construct
  source 1..82: mol_type = other RNA
accttctccgacaggtcctgccatttcaccaggaacatgtatacctgggggaaagccagagtcgggggaccccattcagcct

SEQ ID NO: 34211 - RNA, 82 nt, synthetic construct
  source 1..82: mol_type = other RNA
accttctccgacaggtcctgccatttcaccaggaacatgtaaacctgggggaaagccagagtcgggggaccccattcagcct

SEQ ID NO: 34212 - RNA, 82 nt, synthetic construct
  source 1..82: mol_type = other RNA
accttctccgacaggtcctgccatttcaccaggaacatgtacacctgggggaaagccagagtcgggggaccccattcagcct

SEQ ID NO: 34213 - RNA, 83 nt, synthetic construct
  source 1..83: mol_type = other RNA
caccttctccgacaggtcctgccatttcaccaggaacatgtagacctgggggaaagccagagtcgggggaccccattcagcct

SEQ ID NO: 34214 - RNA, 83 nt, synthetic construct
  source 1..83: mol_type = other RNA
caccttctccgacaggtcctgccatttcaccaggaacatgtacacctgggggaaagccagagtcgggggaccccattcagcct

SEQ ID NO: 34215 - RNA, 83 nt, synthetic construct
  source 1..83: mol_type = other RNA
caccttctccgacaggtcctgccatttcaccaggaacatgtaaacctgggggaaagccagagtcgggggaccccattcagcct

SEQ ID NO: 34216 - RNA, 83 nt, synthetic construct
  source 1..83: mol_type = other RNA
caccttctccgacaggtcctgccatttcaccaggaacatgtatacctgggggaaagccagagtcgggggaccccattcagcct

SEQ ID NO: 34217 - RNA, 84 nt, synthetic construct
  source 1..84: mol_type = other RNA
ccaccttctccgacaggtcctgccatttcaccaggaacatgtaaacctgggggaaagccagagtcgggggaccccattcagcct

SEQ ID NO: 34218 - RNA, 84 nt, synthetic construct
  source 1..84: mol_type = other RNA
ccaccttctccgacaggtcctgccatttcaccaggaacatgtacacctgggggaaagccagagtcgggggaccccattcagcct

SEQ ID NO: 34219 - RNA, 84 nt, synthetic construct
  source 1..84: mol_type = other RNA
ccaccttctccgacaggtcctgccatttcaccaggaacatgtatacctgggggaaagccagagtcgggggaccccattcagcct

SEQ ID NO: 34220 - RNA, 84 nt, synthetic construct
  source 1..84: mol_type = other RNA
ccaccttctccgacaggtcctgccatttcaccaggaacatgtagacctgggggaaagccagagtcgggggaccccattcagcct

SEQ ID NO: 34221 - RNA, 85 nt, synthetic construct
  source 1..85: mol_type = other RNA
accaccttctccgacaggtcctgccatttcaccaggaacatgtagacctgggggaaagccagagtcgggggaccccattcagcct

SEQ ID NO: 34222 - RNA, 85 nt, synthetic construct
  source 1..85: mol_type = other RNA
accaccttctccgacaggtcctgccatttcaccaggaacatgtacacctgggggaaagccagagtcgggggaccccattcagcct

SEQ ID NO: 34223 - RNA, 85 nt, synthetic construct
  source 1..85: mol_type = other RNA
accaccttctccgacaggtcctgccatttcaccaggaacatgtaaacctgggggaaagccagagtcgggggaccccattcagcct

SEQ ID NO: 34224 - RNA, 85 nt, synthetic construct
  source 1..85: mol_type = other RNA
accaccttctccgacaggtcctgccatttcaccaggaacatgtatacctgggggaaagccagagtcgggggaccccattcagcct

SEQ ID NO: 34225 - RNA, 86 nt, synthetic construct
  source 1..86: mol_type = other RNA
gaccaccttctccgacaggtcctgccatttcaccaggaacatgtatacctgggggaaagccagagtcgggggaccccattcagcct

SEQ ID NO: 34226 - RNA, 86 nt, synthetic construct
  source 1..86: mol_type = other RNA
gaccaccttctccgacaggtcctgccatttcaccaggaacatgtagacctgggggaaagccagagtcgggggaccccattcagcct

SEQ ID NO: 34227 - RNA, 86 nt, synthetic construct
  source 1..86: mol_type = other RNA
gaccaccttctccgacaggtcctgccatttcaccaggaacatgtacacctgggggaaagccagagtcgggggaccccattcagcct

SEQ ID NO: 34228 - RNA, 86 nt, synthetic construct
  source 1..86: mol_type = other RNA
gaccaccttctccgacaggtcctgccatttcaccaggaacatgtaaacctgggggaaagccagagtcgggggaccccattcagcct

SEQ ID NO: 34229 - RNA, 87 nt, synthetic construct
  source 1..87: mol_type = other RNA
agaccaccttctccgacaggtcctgccatttcaccaggaacatgtacacctgggggaaagccagagtcgggggaccccattcagcct

SEQ ID NO: 34230 - RNA, 87 nt, synthetic construct
  source 1..87: mol_type = other RNA
agaccaccttctccgacaggtcctgccatttcaccaggaacatgtaaacctgggggaaagccagagtcgggggaccccattcagcct

SEQ ID NO: 34231 - RNA, 87 nt, synthetic construct
  source 1..87: mol_type = other RNA
agaccaccttctccgacaggtcctgccatttcaccaggaacatgtatacctgggggaaagccagagtcgggggaccccattcagcct

SEQ ID NO: 34232 - RNA, 87 nt, synthetic construct
  source 1..87: mol_type = other RNA
agaccaccttctccgacaggtcctgccatttcaccaggaacatgtagacctgggggaaagccagagtcgggggaccccattcagcct

SEQ ID NO: 34233 - RNA, 88 nt, synthetic construct
  source 1..88: mol_type = other RNA
tagaccaccttctccgacaggtcctgccatttcaccaggaacatgtatacctgggggaaagccagagtcgggggaccccattcagcct

SEQ ID NO: 34234 - RNA, 88 nt, synthetic construct
  source 1..88: mol_type = other RNA
tagaccaccttctccgacaggtcctgccatttcaccaggaacatgtagacctgggggaaagccagagtcgggggaccccattcagcct

SEQ ID NO: 34235 - RNA, 88 nt, synthetic construct
  source 1..88: mol_type = other RNA
tagaccaccttctccgacaggtcctgccatttcaccaggaacatgtacacctgggggaaagccagagtcgggggaccccattcagcct

SEQ ID NO: 34236 - RNA, 88 nt, synthetic construct
  source 1..88: mol_type = other RNA
tagaccaccttctccgacaggtcctgccatttcaccaggaacatgtaaacctgggggaaagccagagtcgggggaccccattcagcct

SEQ ID NO: 34237 - RNA, 89 nt, synthetic construct
  source 1..89: mol_type = other RNA
gtagaccaccttctccgacaggtcctgccatttcaccaggaacatgtatacctgggggaaagccagagtcgggggaccccattcagcct

SEQ ID NO: 34238 - RNA, 89 nt, synthetic construct
  source 1..89: mol_type = other RNA
gtagaccaccttctccgacaggtcctgccatttcaccaggaacatgtacacctgggggaaagccagagtcgggggaccccattcagcct

SEQ ID NO: 34239 - RNA, 89 nt, synthetic construct
  source 1..89: mol_type = other RNA
gtagaccaccttctccgacaggtcctgccatttcaccaggaacatgtagacctgggggaaagccagagtcgggggaccccattcagcct

SEQ ID NO: 34240 - RNA, 89 nt, synthetic construct
  source 1..89: mol_type = other RNA
gtagaccaccttctccgacaggtcctgccatttcaccaggaacatgtaaacctgggggaaagccagagtcgggggaccccattcagcct

SEQ ID NO: 34241 - RNA, 90 nt, synthetic construct
  source 1..90: mol_type = other RNA
ggtagaccaccttctccgacaggtcctgccatttcaccaggaacatgtaaacctgggggaaagccagagtcgggggaccccattcagcct

SEQ ID NO: 34242 - RNA, 90 nt, synthetic construct
  source 1..90: mol_type = other RNA
ggtagaccaccttctccgacaggtcctgccatttcaccaggaacatgtagacctgggggaaagccagagtcgggggaccccattcagcct

SEQ ID NO: 34243 - RNA, 90 nt, synthetic construct
  source 1..90: mol_type = other RNA
ggtagaccaccttctccgacaggtcctgccatttcaccaggaacatgtatacctgggggaaagccagagtcgggggaccccattcagcct

SEQ ID NO: 34244 - RNA, 90 nt, synthetic construct
  source 1..90: mol_type = other RNA
ggtagaccaccttctccgacaggtcctgccatttcaccaggaacatgtacacctgggggaaagccagagtcgggggaccccattcagcct

SEQ ID NO: 34245 - RNA, 91 nt, synthetic construct
  source 1..91: mol_type = other RNA
cggtagaccaccttctccgacaggtcctgccatttcaccaggaacatgtaaacctgggggaaagccagagtcgggggaccccattcagcct

SEQ ID NO: 34246 - RNA, 91 nt, synthetic construct
  source 1..91: mol_type = other RNA
cggtagaccaccttctccgacaggtcctgccatttcaccaggaacatgtatacctgggggaaagccagagtcgggggaccccattcagcct

SEQ ID NO: 34247 - RNA, 91 nt, synthetic construct
  source 1..91: mol_type = other RNA
cggtagaccaccttctccgacaggtcctgccatttcaccaggaacatgtagacctgggggaaagccagagtcgggggaccccattcagcct

SEQ ID NO: 34248 - RNA, 91 nt, synthetic construct
  source 1..91: mol_type = other RNA
cggtagaccaccttctccgacaggtcctgccatttcaccaggaacatgtacacctgggggaaagccagagtcgggggaccccattcagcct

SEQ ID NO: 34249 - RNA, 92 nt, synthetic construct
  source 1..92: mol_type = other RNA
ccggtagaccaccttctccgacaggtcctgccatttcaccaggaacatgtaaacctgggggaaagccagagtcgggggaccccattcagcct

SEQ ID NO: 34250 - RNA, 92 nt, synthetic construct
  source 1..92: mol_type = other RNA
ccggtagaccaccttctccgacaggtcctgccatttcaccaggaacatgtacacctgggggaaagccagagtcgggggaccccattcagcct

SEQ ID NO: 34251 - RNA, 92 nt, synthetic construct
  source 1..92: mol_type = other RNA
ccggtagaccaccttctccgacaggtcctgccatttcaccaggaacatgtagacctgggggaaagccagagtcgggggaccccattcagcct

SEQ ID NO: 34252 - RNA, 92 nt, synthetic construct
  source 1..92: mol_type = other RNA
ccggtagaccaccttctccgacaggtcctgccatttcaccaggaacatgtatacctgggggaaagccagagtcgggggaccccattcagcct

SEQ ID NO: 34253 - RNA, 93 nt, synthetic construct
  source 1..93: mol_type = other RNA
gccggtagaccaccttctccgacaggtcctgccatttcaccaggaacatgtagacctgggggaaagccagagtcgggggaccccattcagcct

SEQ ID NO: 34254 - RNA, 93 nt, synthetic construct
  source 1..93: mol_type = other RNA
gccggtagaccaccttctccgacaggtcctgccatttcaccaggaacatgtacacctgggggaaagccagagtcgggggaccccattcagcct

SEQ ID NO: 34255 - RNA, 93 nt, synthetic construct
  source 1..93: mol_type = other RNA
gccggtagaccaccttctccgacaggtcctgccatttcaccaggaacatgtaaacctgggggaaagccagagtcgggggaccccattcagcct

SEQ ID NO: 34256 - RNA, 93 nt, synthetic construct
  source 1..93: mol_type = other RNA
gccggtagaccaccttctccgacaggtcctgccatttcaccaggaacatgtatacctgggggaaagccagagtcgggggaccccattcagcct

SEQ ID NO: 34257 - RNA, 94 nt, synthetic construct
  source 1..94: mol_type = other RNA
cgccggtagaccaccttctccgacaggtcctgccatttcaccaggaacatgtacacctgggggaaagccagagtcgggggaccccattcagcct

SEQ ID NO: 34258 - RNA, 94 nt, synthetic construct
  source 1..94: mol_type = other RNA
cgccggtagaccaccttctccgacaggtcctgccatttcaccaggaacatgtagacctgggggaaagccagagtcgggggaccccattcagcct

SEQ ID NO: 34259 - RNA, 94 nt, synthetic construct
  source 1..94: mol_type = other RNA
cgccggtagaccaccttctccgacaggtcctgccatttcaccaggaacatgtatacctgggggaaagccagagtcgggggaccccattcagcct

SEQ ID NO: 34260 - RNA, 94 nt, synthetic construct
  source 1..94: mol_type = other RNA
cgccggtagaccaccttctccgacaggtcctgccatttcaccaggaacatgtaaacctgggggaaagccagagtcgggggaccccattcagcct

SEQ ID NO: 34261 - RNA, 95 nt, synthetic construct
  source 1..95: mol_type = other RNA
gcgccggtagaccaccttctccgacaggtcctgccatttcaccaggaacatgtatacctgggggaaagccagagtcgggggaccccattcagcct

SEQ ID NO: 34262 - RNA, 95 nt, synthetic construct
  source 1..95: mol_type = other RNA
gcgccggtagaccaccttctccgacaggtcctgccatttcaccaggaacatgtagacctgggggaaagccagagtcgggggaccccattcagcct

SEQ ID NO: 34263 - RNA, 95 nt, synthetic construct
  source 1..95: mol_type = other RNA
gcgccggtagaccaccttctccgacaggtcctgccatttcaccaggaacatgtaaacctgggggaaagccagagtcgggggaccccattcagcct

SEQ ID NO: 34264 - RNA, 95 nt, synthetic construct
  source 1..95: mol_type = other RNA
gcgccggtagaccaccttctccgacaggtcctgccatttcaccaggaacatgtacacctgggggaaagccagagtcgggggaccccattcagcct

SEQ ID NO: 34265 - RNA, 96 nt, synthetic construct
  source 1..96: mol_type = other RNA
agcgccggtagaccaccttctccgacaggtcctgccatttcaccaggaacatgtaaacctgggggaaagccagagtcgggggaccccattcagcct

SEQ ID NO: 34266 - RNA, 96 nt, synthetic construct
  source 1..96: mol_type = other RNA
agcgccggtagaccaccttctccgacaggtcctgccatttcaccaggaacatgtacacctgggggaaagccagagtcgggggaccccattcagcct

SEQ ID NO: 34267 - RNA, 96 nt, synthetic construct
  source 1..96: mol_type = other RNA
agcgccggtagaccaccttctccgacaggtcctgccatttcaccaggaacatgtatacctgggggaaagccagagtcgggggaccccattcagcct

SEQ ID NO: 34268 - RNA, 96 nt, synthetic construct
  source 1..96: mol_type = other RNA
agcgccggtagaccaccttctccgacaggtcctgccatttcaccaggaacatgtagacctgggggaaagccagagtcgggggaccccattcagcct

SEQ ID NO: 34269 - RNA, 97 nt, synthetic construct
  source 1..97: mol_type = other RNA
aagcgccggtagaccaccttctccgacaggtcctgccatttcaccaggaacatgtacacctgggggaaagccagagtcgggggaccccattcagcct

SEQ ID NO: 34270 - RNA, 97 nt, synthetic construct
  source 1..97: mol_type = other RNA
aagcgccggtagaccaccttctccgacaggtcctgccatttcaccaggaacatgtaaacctgggggaaagccagagtcgggggaccccattcagcct

SEQ ID NO: 34271 - RNA, 97 nt, synthetic construct
  source 1..97: mol_type = other RNA
aagcgccggtagaccaccttctccgacaggtcctgccatttcaccaggaacatgtagacctgggggaaagccagagtcgggggaccccattcagcct

SEQ ID NO: 34272 - RNA, 97 nt, synthetic construct
  source 1..97: mol_type = other RNA
aagcgccggtagaccaccttctccgacaggtcctgccatttcaccaggaacatgtatacctgggggaaagccagagtcgggggaccccattcagcct

SEQ ID NO: 34273 - RNA, 98 nt, synthetic construct
  source 1..98: mol_type = other RNA
gaagcgccggtagaccaccttctccgacaggtcctgccatttcaccaggaacatgtatacctgggggaaagccagagtcgggggaccccattcagcct

SEQ ID NO: 34274 - RNA, 98 nt, synthetic construct
  source 1..98: mol_type = other RNA
gaagcgccggtagaccaccttctccgacaggtcctgccatttcaccaggaacatgtacacctgggggaaagccagagtcgggggaccccattcagcct

SEQ ID NO: 34275 - RNA, 98 nt, synthetic construct
  source 1..98: mol_type = other RNA
gaagcgccggtagaccaccttctccgacaggtcctgccatttcaccaggaacatgtaaacctgggggaaagccagagtcgggggaccccattcagcct

SEQ ID NO: 34276 - RNA, 98 nt, synthetic construct
  source 1..98: mol_type = other RNA
gaagcgccggtagaccaccttctccgacaggtcctgccatttcaccaggaacatgtagacctgggggaaagccagagtcgggggaccccattcagcct

SEQ ID NO: 34277 - RNA, 99 nt, synthetic construct
  source 1..99: mol_type = other RNA
tgaagcgccggtagaccaccttctccgacaggtcctgccatttcaccaggaacatgtatacctgggggaaagccagagtcgggggaccccattcagcct

SEQ ID NO: 34278 - RNA, 99 nt, synthetic construct
  source 1..99: mol_type = other RNA
tgaagcgccggtagaccaccttctccgacaggtcctgccatttcaccaggaacatgtaaacctgggggaaagccagagtcgggggaccccattcagcct

SEQ ID NO: 34279 - RNA, 99 nt, synthetic construct
  source 1..99: mol_type = other RNA
tgaagcgccggtagaccaccttctccgacaggtcctgccatttcaccaggaacatgtacacctgggggaaagccagagtcgggggaccccattcagcct

SEQ ID NO: 34280 - RNA, 99 nt, synthetic construct
  source 1..99: mol_type = other RNA
tgaagcgccggtagaccaccttctccgacaggtcctgccatttcaccaggaacatgtagacctgggggaaagccagagtcgggggaccccattcagcct

SEQ ID NO: 34281 - RNA, 100 nt, synthetic construct
  source 1..100: mol_type = other RNA
gtgaagcgccggtagaccaccttctccgacaggtcctgccatttcaccaggaacatgtaaacctgggggaaagccagagtcgggggaccccattcagcct

SEQ ID NO: 34282 - RNA, 100 nt, synthetic construct
  source 1..100: mol_type = other RNA
gtgaagcgccggtagaccaccttctccgacaggtcctgccatttcaccaggaacatgtatacctgggggaaagccagagtcgggggaccccattcagcct

SEQ ID NO: 34283 - RNA, 100 nt, synthetic construct
  source 1..100: mol_type = other RNA
gtgaagcgccggtagaccaccttctccgacaggtcctgccatttcaccaggaacatgtacacctgggggaaagccagagtcgggggaccccattcagcct

SEQ ID NO: 34284 - RNA, 100 nt, synthetic construct
  source 1..100: mol_type = other RNA
gtgaagcgccggtagaccaccttctccgacaggtcctgccatttcaccaggaacatgtagacctgggggaaagccagagtcgggggaccccattcagcct

SEQ ID NO: 34285 - RNA, 101 nt, synthetic construct
  source 1..101: mol_type = other RNA
ggtgaagcgccggtagaccaccttctccgacaggtcctgccatttcaccaggaacatgtaaacctgggggaaagccagagtcgggggaccccattcagcct

SEQ ID NO: 34286 - RNA, 101 nt, synthetic construct
  source 1..101: mol_type = other RNA
ggtgaagcgccggtagaccaccttctccgacaggtcctgccatttcaccaggaacatgtacacctgggggaaagccagagtcgggggaccccattcagcct

SEQ ID NO: 34287 - RNA, 101 nt, synthetic construct
  source 1..101: mol_type = other RNA
ggtgaagcgccggtagaccaccttctccgacaggtcctgccatttcaccaggaacatgtagacctgggggaaagccagagtcgggggaccccattcagcct

SEQ ID NO: 34288 - RNA, 101 nt, synthetic construct
  source 1..101: mol_type = other RNA
ggtgaagcgccggtagaccaccttctccgacaggtcctgccatttcaccaggaacatgtatacctgggggaaagccagagtcgggggaccccattcagcct

SEQ ID NO: 34289 - RNA, 102 nt, synthetic construct
  source 1..102: mol_type = other RNA
cggtgaagcgccggtagaccaccttctccgacaggtcctgccatttcaccaggaacatgtagacctgggggaaagccagagtcgggggaccccattcagcct

SEQ ID NO: 34290 - RNA, 102 nt, synthetic construct
  source 1..102: mol_type = other RNA
cggtgaagcgccggtagaccaccttctccgacaggtcctgccatttcaccaggaacatgtacacctgggggaaagccagagtcgggggaccccattcagcct

SEQ ID NO: 34291 - RNA, 102 nt, synthetic construct
  source 1..102: mol_type = other RNA
cggtgaagcgccggtagaccaccttctccgacaggtcctgccatttcaccaggaacatgtaaacctgggggaaagccagagtcgggggaccccattcagcct

SEQ ID NO: 34292 - RNA, 102 nt, synthetic construct
  source 1..102: mol_type = other RNA
cggtgaagcgccggtagaccaccttctccgacaggtcctgccatttcaccaggaacatgtatacctgggggaaagccagagtcgggggaccccattcagcct

SEQ ID NO: 34293 - RNA, 103 nt, synthetic construct
  source 1..103: mol_type = other RNA
tcggtgaagcgccggtagaccaccttctccgacaggtcctgccatttcaccaggaacatgtatacctgggggaaagccagagtcgggggaccccattcagcct

SEQ ID NO: 34294 - RNA, 103 nt, synthetic construct
  source 1..103: mol_type = other RNA
tcggtgaagcgccggtagaccaccttctccgacaggtcctgccatttcaccaggaacatgtagacctgggggaaagccagagtcgggggaccccattcagcct

SEQ ID NO: 34295 - RNA, 103 nt, synthetic construct
  source 1..103: mol_type = other RNA
tcggtgaagcgccggtagaccaccttctccgacaggtcctgccatttcaccaggaacatgtacacctgggggaaagccagagtcgggggaccccattcagcct

SEQ ID NO: 34296 - RNA, 103 nt, synthetic construct
  source 1..103: mol_type = other RNA
tcggtgaagcgccggtagaccaccttctccgacaggtcctgccatttcaccaggaacatgtaaacctgggggaaagccagagtcgggggaccccattcagcct

SEQ ID NO: 34297 - RNA, 20 nt, synthetic construct
  source 1..20: mol_type = other RNA
tcaccaggaacatgtacacc

SEQ ID NO: 34298 - RNA, 13 nt, synthetic construct
  source 1..13: mol_type = other RNA
acatgtacctggg

SEQ ID NO: 34299 - RNA, 25 nt, synthetic construct
  source 1..25: mol_type = other RNA
acatgtacctgggggaaagccagag

SEQ ID NO: 34300 - RNA, 17 nt, synthetic construct
  source 1..17: mol_type = other RNA
aggaacatgtacctggg

SEQ ID NO: 34301 - RNA, 11 nt, synthetic construct
  source 1..11: mol_type = other RNA
atgtacctggg

SEQ ID NO: 34302 - RNA, 23 nt, synthetic construct
  source 1..23: mol_type = other RNA
atgtacctgggggaaagccagag

SEQ ID NO: 34303 - RNA, 15 nt, synthetic construct
  source 1..15: mol_type = other RNA
gaacatgtacctggg

SEQ ID NO: 34304 - RNA, 27 nt, synthetic construct
  source 1..27: mol_type = other RNA
gaacatgtacctgggggaaagccagag

SEQ ID NO: 34305 - RNA, 12 nt, synthetic construct
  source 1..12: mol_type = other RNA
gctttcccccag

SEQ ID NO: 34306 - RNA, 27 nt, synthetic construct
  source 1..27: mol_type = other RNA
gctttcccccaggtacatgttcctggt

SEQ ID NO: 34307 - RNA, 21 nt, synthetic construct
  source 1..21: mol_type = other RNA
gtacctgggggaaagccagag

SEQ ID NO: 34308 - RNA, 23 nt, synthetic construct
  source 1..23: mol_type = other RNA
tcccccaggtacatgttcctggt

SEQ ID NO: 34309 - RNA, 16 nt, synthetic construct
  source 1..16: mol_type = other RNA
tctggctttcccccag

SEQ ID NO: 34310 - RNA, 14 nt, synthetic construct
  source 1..14: mol_type = other RNA
tggctttcccccag

SEQ ID NO: 34311 - RNA, 29 nt, synthetic construct
  source 1..29: mol_type = other RNA
tggctttcccccaggtacatgttcctggt

SEQ ID NO: 34312 - RNA, 10 nt, synthetic construct
  source 1..10: mol_type = other RNA
tttcccccag

SEQ ID NO: 34313 - RNA, 25 nt, synthetic construct
  source 1..25: mol_type = other RNA
tttcccccaggtacatgttcctggt

SEQ ID NO: 34314 - RNA, 115 nt, synthetic construct
  source 1..115: mol_type = other RNA
gtcaccaggaacatgtacaccgttttagagctagaaatagcaagttaaaataaggctagtccgttatcaacttgaaaaagtggcaccgagtcggtgctttcccccaggtacatgt

SEQ ID NO: 34315 - RNA, 117 nt, synthetic construct
  source 1..117: mol_type = other RNA
gtcaccaggaacatgtacaccgttttagagctagaaatagcaagttaaaataaggctagtccgttatcaacttgaaaaagtggcaccgagtcggtgcgctttcccccaggtacatgt

SEQ ID NO: 34316 - RNA, 119 nt, synthetic construct
  source 1..119: mol_type = other RNA
gtcaccaggaacatgtacaccgttttagagctagaaatagcaagttaaaataaggctagtccgttatcaacttgaaaaagtggcaccgagtcggtgctggctttcccccaggtacatgt

SEQ ID NO: 34317 - RNA, 121 nt, synthetic construct
  source 1..121: mol_type = other RNA
gtcaccaggaacatgtacaccgttttagagctagaaatagcaagttaaaataaggctagtccgttatcaacttgaaaaagtggcaccgagtcggtgctctggctttcccccaggtacatgt

SEQ ID NO: 34318 - RNA, 117 nt, synthetic construct
  source 1..117: mol_type = other RNA
gtcaccaggaacatgtacaccgttttagagctagaaatagcaagttaaaataaggctagtccgttatcaacttgaaaaagtggcaccgagtcggtgctttcccccaggtacatgttc

SEQ ID NO: 34319 - RNA, 119 nt, synthetic construct
  source 1..119: mol_type = other RNA
gtcaccaggaacatgtacaccgttttagagctagaaatagcaagttaaaataaggctagtccgttatcaacttgaaaaagtggcaccgagtcggtgcgctttcccccaggtacatgttc

SEQ ID NO: 34320 - RNA, 121 nt, synthetic construct
  source 1..121: mol_type = other RNA
gtcaccaggaacatgtacaccgttttagagctagaaatagcaagttaaaataaggctagtccgttatcaacttgaaaaagtggcaccgagtcggtgctggctttcccccaggtacatgttc

SEQ ID NO: 34321 - RNA, 123 nt, synthetic construct
  source 1..123: mol_type = other RNA
gtcaccaggaacatgtacaccgttttagagctagaaatagcaagttaaaataaggctagtccgttatcaacttgaaaaagtggcaccgagtcggtgctctggctttcccccaggtacatgttc

SEQ ID NO: 34322 - RNA, 119 nt, synthetic construct
  source 1..119: mol_type = other RNA
gtcaccaggaacatgtacaccgttttagagctagaaatagcaagttaaaataaggctagtccgttatcaacttgaaaaagtggcaccgagtcggtgctttcccccaggtacatgttcct

SEQ ID NO: 34323 - RNA, 121 nt, synthetic construct
  source 1..121: mol_type = other RNA
gtcaccaggaacatgtacaccgttttagagctagaaatagcaagttaaaataaggctagtccgttatcaacttgaaaaagtggcaccgagtcggtgcgctttcccccaggtacatgttcct

SEQ ID NO: 34324 - RNA, 123 nt, synthetic construct
  source 1..123: mol_type = other RNA
gtcaccaggaacatgtacaccgttttagagctagaaatagcaagttaaaataaggctagtccgttatcaacttgaaaaagtggcaccgagtcggtgctggctttcccccaggtacatgttcct

SEQ ID NO: 34325 - RNA, 125 nt, synthetic construct
  source 1..125: mol_type = other RNA
gtcaccaggaacatgtacaccgttttagagctagaaatagcaagttaaaataaggctagtccgttatcaacttgaaaaagtggcaccgagtcggtgctctggctttcccccaggtacatgttcct

SEQ ID NO: 34326 - RNA, 121 nt, synthetic construct
  source 1..121: mol_type = other RNA
gtcaccaggaacatgtacaccgttttagagctagaaatagcaagttaaaataaggctagtccgttatcaacttgaaaaagtggcaccgagtcggtgctttcccccaggtacatgttcctgg

SEQ ID NO: 34327 - RNA, 123 nt, synthetic construct
  source 1..123: mol_type = other RNA
gtcaccaggaacatgtacaccgttttagagctagaaatagcaagttaaaataaggctagtccgttatcaacttgaaaaagtggcaccgagtcggtgcgctttcccccaggtacatgttcctgg

SEQ ID NO: 34328 - RNA, 125 nt, synthetic construct
  source 1..125: mol_type = other RNA
gtcaccaggaacatgtacaccgttttagagctagaaatagcaagttaaaataaggctagtccgttatcaacttgaaaaagtggcaccgagtcggtgctggctttcccccaggtacatgttcctgg

SEQ ID NO: 34329 - RNA, 127 nt, synthetic construct
  source 1..127: mol_type = other RNA
gtcaccaggaacatgtacaccgttttagagctagaaatagcaagttaaaataaggctagtccgttatcaacttgaaaaagtggcaccgagtcggtgctctggctttcccccaggtacatgttcctgg

SEQ ID NO: 34330 - RNA, 116 nt, synthetic construct
  source 1..116: mol_type = other RNA
gcccgactctggctttcccccgttttagagctagaaatagcaagttaaaataaggctagtccgttatcaacttgaaaaagtggcaccgagtcggtgcatgtacctgggggaaagcc

SEQ ID NO: 34331 - RNA, 118 nt, synthetic construct
  source 1..118: mol_type = other RNA
gcccgactctggctttcccccgttttagagctagaaatagcaagttaaaataaggctagtccgttatcaacttgaaaaagtggcaccgagtcggtgcacatgtacctgggggaaagcc

SEQ ID NO: 34332 - RNA, 120 nt, synthetic construct
  source 1..120: mol_type = other RNA
gcccgactctggctttcccccgttttagagctagaaatagcaagttaaaataaggctagtccgttatcaacttgaaaaagtggcaccgagtcggtgcgaacatgtacctgggggaaagcc

SEQ ID NO: 34333 - RNA, 122 nt, synthetic construct
  source 1..122: mol_type = other RNA
gcccgactctggctttcccccgttttagagctagaaatagcaagttaaaataaggctagtccgttatcaacttgaaaaagtggcaccgagtcggtgcaggaacatgtacctgggggaaagcc

SEQ ID NO: 34334 - RNA, 118 nt, synthetic construct
  source 1..118: mol_type = other RNA
gcccgactctggctttcccccgttttagagctagaaatagcaagttaaaataaggctagtccgttatcaacttgaaaaagtggcaccgagtcggtgcatgtacctgggggaaagccag

SEQ ID NO: 34335 - RNA, 120 nt, synthetic construct
  source 1..120: mol_type = other RNA
gcccgactctggctttcccccgttttagagctagaaatagcaagttaaaataaggctagtccgttatcaacttgaaaaagtggcaccgagtcggtgcacatgtacctgggggaaagccag

SEQ ID NO: 34336 - RNA, 122 nt, synthetic construct
  source 1..122: mol_type = other RNA
gcccgactctggctttcccccgttttagagctagaaatagcaagttaaaataaggctagtccgttatcaacttgaaaaagtggcaccgagtcggtgcgaacatgtacctgggggaaagccag

SEQ ID NO: 34337 - RNA, 124 nt, synthetic construct
  source 1..124: mol_type = other RNA
gcccgactctggctttcccccgttttagagctagaaatagcaagttaaaataaggctagtccgttatcaacttgaaaaagtggcaccgagtcggtgcaggaacatgtacctgggggaaagccag

SEQ ID NO: 34338 - RNA, 120 nt, synthetic construct
  source 1..120: mol_type = other RNA
gcccgactctggctttcccccgttttagagctagaaatagcaagttaaaataaggctagtccgttatcaacttgaaaaagtggcaccgagtcggtgcatgtacctgggggaaagccagag

SEQ ID NO: 34339 - RNA, 122 nt, synthetic construct
  source 1..122: mol_type = other RNA
gcccgactctggctttcccccgttttagagctagaaatagcaagttaaaataaggctagtccgttatcaacttgaaaaagtggcaccgagtcggtgcacatgtacctgggggaaagccagag

SEQ ID NO: 34340 - RNA, 124 nt, synthetic construct
  source 1..124: mol_type = other RNA
gcccgactctggctttcccccgttttagagctagaaatagcaagttaaaataaggctagtccgttatcaacttgaaaaagtggcaccgagtcggtgcgaacatgtacctgggggaaagccagag

SEQ ID NO: 34341 - RNA, 126 nt, synthetic construct
  source 1..126: mol_type = other RNA
gcccgactctggctttcccccgttttagagctagaaatagcaagttaaaataaggctagtccgttatcaacttgaaaaagtggcaccgagtcggtgcaggaacatgtacctgggggaaagccagag

SEQ ID NO: 34342 - RNA, 122 nt, synthetic construct
  source 1..122: mol_type = other RNA
gcccgactctggctttcccccgttttagagctagaaatagcaagttaaaataaggctagtccgttatcaacttgaaaaagtggcaccgagtcggtgcatgtacctgggggaaagccagagtc

SEQ ID NO: 34343 - RNA, 124 nt, synthetic construct
  source 1..124: mol_type = other RNA
gcccgactctggctttcccccgttttagagctagaaatagcaagttaaaataaggctagtccgttatcaacttgaaaaagtggcaccgagtcggtgcacatgtacctgggggaaagccagagtc

SEQ ID NO: 34344 - RNA, 126 nt, synthetic construct
  source 1..126: mol_type = other RNA
gcccgactctggctttcccccgttttagagctagaaatagcaagttaaaataaggctagtccgttatcaacttgaaaaagtggcaccgagtcggtgcgaacatgtacctgggggaaagccagagtc

SEQ ID NO: 34345 - RNA, 130 nt, synthetic construct
  source 1..130: mol_type = other RNA
gacaggtcctgccatttcaccgttttagagctagaaatagcaagttaaaataaggctagtccgttatcaacttgaaaaagtggcaccgagtcggtgctcccccaggtacatgttcctggtgaaatggcag

SEQ ID NO: 34346 - RNA, 132 nt, synthetic construct
  source 1..132: mol_type = other RNA
gacaggtcctgccatttcaccgttttagagctagaaatagcaagttaaaataaggctagtccgttatcaacttgaaaaagtggcaccgagtcggtgctcccccaggtacatgttcctggtgaaatggcagga

SEQ ID NO: 34347 - RNA, 134 nt, synthetic construct
  source 1..134: mol_type = other RNA
gacaggtcctgccatttcaccgttttagagctagaaatagcaagttaaaataaggctagtccgttatcaacttgaaaaagtggcaccgagtcggtgctttcccccaggtacatgttcctggtgaaatggcagga

SEQ ID NO: 34348 - RNA, 136 nt, synthetic construct
  source 1..136: mol_type = other RNA
gacaggtcctgccatttcaccgttttagagctagaaatagcaagttaaaataaggctagtccgttatcaacttgaaaaagtggcaccgagtcggtgcgctttcccccaggtacatgttcctggtgaaatggcagga

SEQ ID NO: 34349 - RNA, 134 nt, synthetic construct
  source 1..134: mol_type = other RNA
gacaggtcctgccatttcaccgttttagagctagaaatagcaagttaaaataaggctagtccgttatcaacttgaaaaagtggcaccgagtcggtgctcccccaggtacatgttcctggtgaaatggcaggacc

SEQ ID NO: 34350 - RNA, 136 nt, synthetic construct
  source 1..136: mol_type = other RNA
gacaggtcctgccatttcaccgttttagagctagaaatagcaagttaaaataaggctagtccgttatcaacttgaaaaagtggcaccgagtcggtgctttcccccaggtacatgttcctggtgaaatggcaggacc

SEQ ID NO: 34351 - RNA, 138 nt, synthetic construct
  source 1..138: mol_type = other RNA
gacaggtcctgccatttcaccgttttagagctagaaatagcaagttaaaataaggctagtccgttatcaacttgaaaaagtggcaccgagtcggtgcgctttcccccaggtacatgttcctggtgaaatggcaggacc

SEQ ID NO: 34352 - RNA, 140 nt, synthetic construct
  source 1..140: mol_type = other RNA
gacaggtcctgccatttcaccgttttagagctagaaatagcaagttaaaataaggctagtccgttatcaacttgaaaaagtggcaccgagtcggtgctggctttcccccaggtacatgttcctggtgaaatggcaggacc

SEQ ID NO: 34353 - RNA, 126 nt, synthetic construct
  source 1..126: mol_type = other RNA
gtgaatggggtcccccgactcgttttagagctagaaatagcaagttaaaataaggctagtccgttatcaacttgaaaaagtggcaccgagtcggtgcgtacctgggggaaagccagagtcggggga

SEQ ID NO: 34354 - RNA, 128 nt, synthetic construct
  source 1..128: mol_type = other RNA
gtgaatggggtcccccgactcgttttagagctagaaatagcaagttaaaataaggctagtccgttatcaacttgaaaaagtggcaccgagtcggtgcatgtacctgggggaaagccagagtcggggga

SEQ ID NO: 34355 - RNA, 130 nt, synthetic construct
  source 1..130: mol_type = other RNA
gtgaatggggtcccccgactcgttttagagctagaaatagcaagttaaaataaggctagtccgttatcaacttgaaaaagtggcaccgagtcggtgcacatgtacctgggggaaagccagagtcggggga

SEQ ID NO: 34356 - RNA, 128 nt, synthetic construct
  source 1..128: mol_type = other RNA
gtgaatggggtcccccgactcgttttagagctagaaatagcaagttaaaataaggctagtccgttatcaacttgaaaaagtggcaccgagtcggtgcgtacctgggggaaagccagagtcgggggacc

SEQ ID NO: 34357 - RNA, 130 nt, synthetic construct
  source 1..130: mol_type = other RNA
gtgaatggggtcccccgactcgttttagagctagaaatagcaagttaaaataaggctagtccgttatcaacttgaaaaagtggcaccgagtcggtgcatgtacctgggggaaagccagagtcgggggacc

SEQ ID NO: 34358 - RNA, 134 nt, synthetic construct
  source 1..134: mol_type = other RNA
gtgaatggggtcccccgactcgttttagagctagaaatagcaagttaaaataaggctagtccgttatcaacttgaaaaagtggcaccgagtcggtgcgaacatgtacctgggggaaagccagagtcgggggacc

SEQ ID NO: 34359 - RNA, 130 nt, synthetic construct
  source 1..130: mol_type = other RNA
gtgaatggggtcccccgactcgttttagagctagaaatagcaagttaaaataaggctagtccgttatcaacttgaaaaagtggcaccgagtcggtgcgtacctgggggaaagccagagtcgggggacccc

SEQ ID NO: 34360 - RNA, 132 nt, synthetic construct
  source 1..132: mol_type = other RNA
gtgaatggggtcccccgactcgttttagagctagaaatagcaagttaaaataaggctagtccgttatcaacttgaaaaagtggcaccgagtcggtgcatgtacctgggggaaagccagagtcgggggacccc

SEQ ID NO: 34361 - protein, 677 aa, Moloney murine leukemia virus
TLNIEDEHRLHETSKEPDVSLGSTWLSDFPQAWAETGGMGLAVRQAPLIIPLKATSTPVSIKQYPMSQEARLGIKPHIQRLLDQGILVPCQSPWNTPLLPVKKPGTNDYRPVQDLREVNKRVEDIHPTVPNPYNLLSGLPPSHQWYTVLDLKDAFFCLRLHPTSQPLFAFEWRDPEMGISGQLTWTRLPQGFKNSPTLFDEALHRDLADFRIQHPDLILLQYVDDLLLAATSELDCQQGTRALLQTLGNLGYRASAKKAQICQKQVKYLGYLLKEGQRWLTEARKETVMGQPTPKTPRQLREFLGTAGFCRLWIPGFAEMAAPLYPLTKTGTLFNWGPDQQKAYQEIKQALLTAPALGLPDLTKPFELFVDEKQGYAKGVLTQKLGPWRRPVAYLSKKLDPVAAGWPPCLRMVAAIAVLTKDAGKLTMGQPLVILAPHAVEALVKQPPDRWLSNARMTHYQALLLDTDRVQFGPVVALNPATLLPLPEEGLQHNCLDILAEAHGTRPDLTDQPLPDADHTWYTDGSSLLQEGQRKAGAAVTTETEVIWAKALPAGTSAQRAELIALTQALKMAEGKKLNVYTDSRYAFATAHIHGEIYRRRGLLTSEGKEIKNKDEILALLKALFLPKRLSIIHCPGHQKGHSAEARGNRMADQAARKAAITETPDTSTLLIENSSP

SEQ ID NO: 34362 - protein, 677 aa, synthetic construct
TLNIEDEYRLHETSKEPDVSLGSTWLSDFPQAWAETGGMGLAVRQAPLIIPLKATSTPVSIKQYPMSQEARLGIKPHIQRLLDQGILVPCQSPWNTPLLPVKKPGTNDYRPVQDLREVNKRVEDIHPTVPNPYNLLSGLPPSHQWYTVLDLKDAFFCLRLHPTSQPLFAFEWRDPEMGISGQLTWTRLPQGFKNSPTLFDEALHRDLADFRIQHPDLILLQYVDDLLLAATSELDCQQGTRALLQTLGNLGYRASAKKAQICQKQVKYLGYLLKEGQRWLTEARKETVMGQPTPKTPRQLREFLGTAGFCRLWIPGFAEMAAPLYPLTKTGTLFNWGPDQQKAYQEIKQALLTAPALGLPDLTKPFELFVDEKQGYAKGVLTQKLGPWRRPVAYLSKKLDPVAAGWPPCLRMVAAIAVLTKDAGKLTMGQPLVILAPHAVEALVKQPPDRWLSNARMTHYQALLLDTDRVQFGPVVALNPATLLPLPEEGLQHNCLDILAEAHGTRPDLTDQPLPDADHTWYTDGSSLLQEGQRKAGAAVTTETEVIWAKALPAGTSAQRAELIALTQALKMAEGKKLNVYTDSRYAFATAHIHGEIYRRRGLLTSEGKEIKNKDEILALLKALFLPKRLSIIHCPGHQKGHSAEARGNRMADQAARKAAITETPDTSTLLIENSSP

SEQ ID NO: 34363 - protein, 677 aa, synthetic construct
TLNIEDEYRLHETSKEPDVSLGSTWLSDFPQAWAETGGMGLAVRQAPLIIPLKATSTPVSIKQYPMSQEARLGIKPHIQRLLDQGILVPCQSPWNTPLLPVKKPGTNDYRPVQDLREVNKRVEDIHPTVPNPYNLLSGLPPSHQWYTVLDLKDAFFCLRLHPTSQPLFAFEWRDPEMGISGQLTWTRLPQGFKNSPTLFNEALHRDLADFRIQHPDLILLQYVDDLLLAATSELDCQQGTRALLQTLGNLGYRASAKKAQICQKQVKYLGYLLKEGQRWLTEARKETVMGQPTPKTPRQLREFLGKAGFCRLFIPGFAEMAAPLYPLTKPGTLFNWGPDQQKAYQEIKQALLTAPALGLPDLTKPFELFVDEKQGYAKGVLTQKLGPWRRPVAYLSKKLDPVAAGWPPCLRMVAAIAVLTKDAGKLTMGQPLVILAPHAVEALVKQPPDRWLSNARMTHYQALLLDTDRVQFGPVVALNPATLLPLPEEGLQHNCLDILAEAHGTRPDLTDQPLPDADHTWYTDGSSLLQEGQRKAGAAVTTETEVIWAKALPAGTSAQRAELIALTQALKMAEGKKLNVYTDSRYAFATAHIHGEIYRRRGWLTSEGKEIKNKDEILALLKALFLPKRLSIIHCPGHQKGHSAEARGNRMADQAARKAAITETPDTSTLLIENSSP

SEQ ID NO: 34364 - protein, 1368 aa, Streptococcus pyogenes [sequence omitted]

SEQ ID NO: 34365 - protein, 1368 aa, synthetic construct
MDKKYSIGLDIGTNSVGWAVITDEYKVPSKKFKVLGNTDRHSIKKNLIGALLFDSGETAEATRLKRTARRRYTRRKNRICYLQEIFSNEMAKVDDSFFHRLEESFLVEEDKKHERHPIFGNIVDEVAYHEKYPTIYHLRKKLVDSTDKADLRLIYLALAHMIKFRGHFLIEGDLNPDNSDVDKLFIQLVQTYNQLFEENPINASGVDAKAILSARLSKSRRLENLIAQLPGEKKNGLFGNLIALSLGLTPNFKSNFDLAEDAKLQLSKDTYDDDLDNLLAQIGDQYADLFLAAKNLSDAILLSDILRVNTEITKAPLSASMIKRYDEHHQDLTLLKALVRQQLPEKYKEIFFDQSKNGYAGYIDGGASQEEFYKFIKPILEKMDGTEELLVKLNREDLLRKQRTFDNGSIPHQIHLGELHAILRRQEDFYPFLKDNREKIEKILTFRIPYYVGPLARGNSRFAWMTRKSEETITPWNFEEVVDKGASAQSFIERMTNFDKNLPNEKVLPKHSLLYEYFTVYNELTKVKYVTEGMRKPAFLSGEQKKAIVDLLFKTNRKVTVKQLKEDYFKKIECFDSVEISGVEDRFNASLGTYHDLLKIIKDKDFLDNEENEDILEDIVLTLTLFEDREMIEERLKTYAHLFDDKVMKQLKRRRYTGWGRLSRKLINGIRDKQSGKTILDFLKSDGFANRNFMQLIHDDSLTFKEDIQKAQVSGQGDSLHEHIANLAGSPAIKKGILQTVKVVDELVKVMGRHKPENIVIEMARENQTTQKGQKNSRERMKRIEEGIKELGSQILKEHPVENTQLQNEKLYLYYLQNGRDMYVDQELDINRLSDYDVDAIVPQSFLKDDSIDNKVLTRSDKNRGKSDNVPSEEVVKKMKNYWRQLLNAKLITQRKFDNLTKAERGGLSELDKAGFIKRQLVETRQITKHVAQILDSRMNTKYDENDKLIREVKVITLKSKLVSDFRKDFQFYKVREINNYHHAHDAYLNAVVGTALIKKYPKLESEFVYGDYKVYDVRKMIAKSEQEIGKATAKYFFYSNIMNFFKTEITLANGEIRKRPLIETNGETGEIVWDKGRDFATVRKVLSMPQVNIVKKTEVQTGGFSKESILPKRNSDKLIARKKDWDPKKYGGFDSPTVAYSVLVVAKVEKGKSKKLKSVKELLGITIMERSSFEKNPIDFLEAKGYKEVKKDLIIKLPKYSLFELENGRKRMLASAGELQKGNELALPSKYVNFLYLASHYEKLKGSPEDNEQKQLFVEQHKHYLDEIIEQISEFSKRVILADANLDKVLSAYNKHRDKPIREQAENIIHLFTLTNLGAPAAFKYFDTTIDRKRYTSTKEVLDATLIHQSITGLYETRIDLSQLGGD

SEQ ID NO: 34366 - protein, 1367 aa, synthetic construct
DKKYSIGLDIGTNSVGWAVITDEYKVPSKKFKVLGNTDRHSIKKNLIGALLFDSGETAEATRLKRTARRRYTRRKNRICYLQEIFSNEMAKVDDSFFHRLEESFLVEEDKKHERHPIFGNIVDEVAYHEKYPTIYHLRKKLVDSTDKADLRLIYLALAHMIKFRGHFLIEGDLNPDNSDVDKLFIQLVQTYNQLFEENPINASGVDAKAILSARLSKSRRLENLIAQLPGEKKNGLFGNLIALSLGLTPNFKSNFDLAEDAKLQLSKDTYDDDLDNLLAQIGDQYADLFLAAKNLSDAILLSDILRVNTEITKAPLSASMIKRYDEHHQDLTLLKALVRQQLPEKYKEIFFDQSKNGYAGYIDGGASQEEFYKFIKPILEKMDGTEELLVKLNREDLLRKQRTFDNGSIPHQIHLGELHAILRRQEDFYPFLKDNREKIEKILTFRIPYYVGPLARGNSRFAWMTRKSEETITPWNFEEVVDKGASAQSFIERMTNFDKNLPNEKVLPKHSLLYEYFTVYNELTKVKYVTEGMRKPAFLSGEQKKAIVDLLFKTNRKVTVKQLKEDYFKKIECFDSVEISGVEDRFNASLGTYHDLLKIIKDKDFLDNEENEDILEDIVLTLTLFEDREMIEERLKTYAHLFDDKVMKQLKRRRYTGWGRLSRKLINGIRDKQSGKTILDFLKSDGFANRNFMQLIHDDSLTFKEDIQKAQVSGQGDSLHEHIANLAGSPAIKKGILQTVKVVDELVKVMGRHKPENIVIEMARENQTTQKGQKNSRERMKRIEEGIKELGSQILKEHPVENTQLQNEKLYLYYLQNGRDMYVDQELDINRLSDYDVDAIVPQSFLKDDSIDNKVLTRSDKNRGKSDNVPSEEVVKKMKNYWRQLLNAKLITQRKFDNLTKAERGGLSELDKAGFIKRQLVETRQITKHVAQILDSRMNTKYDENDKLIREVKVITLKSKLVSDFRKDFQFYKVREINNYHHAHDAYLNAVVGTALIKKYPKLESEFVYGDYKVYDVRKMIAKSEQEIGKATAKYFFYSNIMNFFKTEITLANGEIRKRPLIETNGETGEIVWDKGRDFATVRKVLSMPQVNIVKKTEVQTGGFSKESILPKRNSDKLIARKKDWDPKKYGGFDSPTVAYSVLVVAKVEKGKSKKLKSVKELLGITIMERSSFEKNPIDFLEAKGYKEVKKDLIIKLPKYSLFELENGRKRMLASAGELQKGNELALPSKYVNFLYLASHYEKLKGSPEDNEQKQLFVEQHKHYLDEIIEQISEFSKRVILADANLDKVLSAYNKHRDKPIREQAENIIHLFTLTNLGAPAAFKYFDTTIDRKRYTSTKEVLDATLIHQSITGLYETRIDLSQLGGD

SEQ ID NO: 34367 - protein, 1054 aa, Staphylococcus lugdunensis
MNQKFILGLDIGITSVGYGLIDYETKNIIDAGVRLFPEANVENNEGRRSKRGSRRLKRRRIHRLERVKKLLEDYNLLDQSQIPQSTNPYAIRVKGLSEALSKDELVIALLHIAKRRGIHKIDVIDSNDDVGNELSTKEQLNKNSKLLKDKFVCQIQLERMNEGQVRGEKNRFKTADIIKEIIQLLNVQKNFHQLDENFINKYIELVEMRREYFEGPGKGSPYGWEGDPKAWYETLMGHCTYFPDELRSVKYAYSADLFNALNDLNNLVIQRDGLSKLEYHEKYHIIENVFKQKKKPTLKQIANEINVNPEDIKGYRITKSGKPQFTEFKLYHDLKSVLFDQSILENEDVLDQIAEILTIYQDKDSIKSKLTELDILLNEEDKENIAQLTGYTGTHRLSLKCIRLVLEEQWYSSRNQMEIFTHLNIKPKKINLTAANKIPKAMIDEFILSPVVKRTFGQAINLINKIIEKYGVPEDIIIELARENNSKDKQKFINEMQKKNENTRKRINEIIGKYGNQNAKRLVEKIRLHDEQEGKCLYSLESIPLEDLLNNPNHYEVDHIIPRSVSFDNSYHNKVLVKQSENSKKSNLTPYQYFNSGKSKLSYNQFKQHILNLSKSQDRISKKKKEYLLEERDINKFEVQKEFINRNLVDTRYATRELTNYLKAYFSANNMNVKVKTINGSFTDYLRKVWKFKKERNHGYKHHAEDALIIANADFLFKENKKLKAVNSVLEKPEIESKQLDIQVDSEDNYSEMFIIPKQVQDIKDFRNFKYSHRVDKKPNRQLINDTLYSTRKKDNSTYIVQTIKDIYAKDNTTLKKQFDKSPEKFLMYQHDPRTFEKLEVIMKQYANEKNPLAKYHEETGEYLTKYSKKNNGPIVKSLKYIGNKLGSHLDVTHQFKSSTKKLVKLSIKPYRFDVYLTDKGYKFITISYLDVLKKDNYYYIPEQKYDKLKLGKAIDKNAKFIASFYKNDLIKLDGEIYKIIGVNSDTRNMIELDLPDIRYKEYCELNNIKGEPRIKKTIGKKVNSIEKLTTDVLGNVFTNTQYTKPQLLFKRGN

SEQ ID NO: 34368 - protein, 1054 aa, synthetic construct
MNQKFILGLDIGITSVGYGLIDYETKNIIDAGVRLFPEANVENNEGRRSKRGSRRLKRRRIHRLERVKKLLEDYNLLDQSQIPQSTNPYAIRVKGLSEALSKDELVIALLHIAKRRGIHKIDVIDSNDDVGNELSTKEQLNKNSKLLKDKFVCQIQLERMNEGQVRGEKNRFKTADIIKEIIQLLNVQKNFHQLDENFINKYIELVEMRREYFEGPGKGSPYGWEGDPKAWYETLMGHCTYFPDELRSVKYAYSADLFNALNDLNNLVIQRDGLSKLEYHEKYHIIENVFKQKKKPTLKQIANEINVNPEDIKGYRITKSGKPQFTEFKLYHDLKSVLFDQSILENEDVLDQIAEILTIYQDKDSIKSKLTELDILLNEEDKENIAQLTGYTGTHRLSLKCIRLVLEEQWYSSRNQMEIFTHLNIKPKKINLTAANKIPKAMIDEFILSPVVKRTFGQAINLINKIIEKYGVPEDIIIELARENNSKDKQKFINEMQKKNENTRKRINEIIGKYGNQNAKRLVEKIRLHDEQEGKCLYSLESIPLEDLLNNPNHYEVDHIIPRSVSFDNSYHNKVLVKQSEASKKSNLTPYQYFNSGKSKLSYNQFKQHILNLSKSQDRISKKKKEYLLEERDINKFEVQKEFINRNLVDTRYATRELTNYLKAYFSANNMNVKVKTINGSFTDYLRKVWKFKKERNHGYKHHAEDALIIANADFLFKENKKLKAVNSVLEKPEIESKQLDIQVDSEDNYSEMFIIPKQVQDIKDFRNFKYSHRVDKKPNRQLINDTLYSTRKKDNSTYIVQTIKDIYAKDNTTLKKQFDKSPEKFLMYQHDPRTFEKLEVIMKQYANEKNPLAKYHEETGEYLTKYSKKNNGPIVKSLKYIGNKLGSHLDVTHQFKSSTKKLVKLSIKPYRFDVYLTDKGYKFITISYLDVLKKDNYYYIPEQKYDKLKLGKAIDKNAKFIASFYKNDLIKLDGEIYKIIGVNSDTRNMIELDLPDIRYKEYCELNNIKGEPRIKKTIGKKVNSIEKLTTDVLGNVFTNTQYTKPQLLFKRGN

SEQ ID NO: 34369 - protein, 1053 aa, synthetic construct
NQKFILGLDIGITSVGYGLIDYETKNIIDAGVRLFPEANVENNEGRRSKRGSRRLKRRRIHRLERVKKLLEDYNLLDQSQIPQSTNPYAIRVKGLSEALSKDELVIALLHIAKRRGIHKIDVIDSNDDVGNELSTKEQLNKNSKLLKDKFVCQIQLERMNEGQVRGEKNRFKTADIIKEIIQLLNVQKNFHQLDENFINKYIELVEMRREYFEGPGKGSPYGWEGDPKAWYETLMGHCTYFPDELRSVKYAYSADLFNALNDLNNLVIQRDGLSKLEYHEKYHIIENVFKQKKKPTLKQIANEINVNPEDIKGYRITKSGKPQFTEFKLYHDLKSVLFDQSILENEDVLDQIAEILTIYQDKDSIKSKLTELDILLNEEDKENIAQLTGYTGTHRLSLKCIRLVLEEQWYSSRNQMEIFTHLNIKPKKINLTAANKIPKAMIDEFILSPVVKRTFGQAINLINKIIEKYGVPEDIIIELARENNSKDKQKFINEMQKKNENTRKRINEIIGKYGNQNAKRLVEKIRLHDEQEGKCLYSLESIPLEDLLNNPNHYEVDHIIPRSVSFDNSYHNKVLVKQSEASKKSNLTPYQYFNSGKSKLSYNQFKQHILNLSKSQDRISKKKKEYLLEERDINKFEVQKEFINRNLVDTRYATRELTNYLKAYFSANNMNVKVKTINGSFTDYLRKVWKFKKERNHGYKHHAEDALIIANADFLFKENKKLKAVNSVLEKPEIESKQLDIQVDSEDNYSEMFIIPKQVQDIKDFRNFKYSHRVDKKPNRQLINDTLYSTRKKDNSTYIVQTIKDIYAKDNTTLKKQFDKSPEKFLMYQHDPRTFEKLEVIMKQYANEKNPLAKYHEETGEYLTKYSKKNNGPIVKSLKYIGNKLGSHLDVTHQFKSSTKKLVKLSIKPYRFDVYLTDKGYKFITISYLDVLKKDNYYYIPEQKYDKLKLGKAIDKNAKFIASFYKNDLIKLDGEIYKIIGVNSDTRNMIELDLPDIRYKEYCELNNIKGEPRIKKTIGKKVNSIEKLTTDVLGNVFTNTQYTKPQLLFKRGN

SEQ ID NO: 34370 - protein, 1053 aa, Staphylococcus aureus
MKRNYILGLDIGITSVGYGIIDYETRDVIDAGVRLFKEANVENNEGRRSKRGARRLKRRRRHRIQRVKKLLFDYNLLTDHSELSGINPYEARVKGLSQKLSEEEFSAALLHLAKRRGVHNVNEVEEDTGNELSTKEQISRNSKALEEKYVAELQLERLKKDGEVRGSINRFKTSDYVKEAKQLLKVQKAYHQLDQSFIDTYIDLLETRRTYYEGPGEGSPFGWKDIKEWYEMLMGHCTYFPEELRSVKYAYNADLYNALNDLNNLVITRDENEKLEYYEKFQIIENVFKQKKKPTLKQIAKEILVNEEDIKGYRVTSTGKPEFTNLKVYHDIKDITARKEIIENAELLDQIAKILTIYQSSEDIQEELTNLNSELTQEEIEQISNLKGYTGTHNLSLKAINLILDELWHTNDNQIAIFNRLKLVPKKVDLSQQKEIPTTLVDDFILSPVVKRSFIQSIKVINAIIKKYGLPNDIIIELAREKNSKDAQKMINEMQKRNRQTNERIEEIIRTTGKENAKYLIEKIKLHDMQEGKCLYSLEAIPLEDLLNNPFNYEVDHIIPRSVSFDNSFNNKVLVKQEENSKKGNRTPFQYLSSSDSKISYETFKKHILNLAKGKGRISKTKKEYLLEERDINRFSVQKDFINRNLVDTRYATRGLMNLLRSYFRVNNLDVKVKSINGGFTSFLRRKWKFKKERNKGYKHHAEDALIIANADFIFKEWKKLDKAKKVMENQMFEEKQAESMPEIETEQEYKEIFITPHQIKHIKDFKDYKYSHRVDKKPNRELINDTLYSTRKDDKGNTLIVNNLNGLYDKDNDKLKKLINKSPEKLLMYHHDPQTYQKLKLIMEQYGDEKNPLYKYYEETGNYLTKYSKKDNGPVIKKIKYYGNKLNAHLDITDDYPNSRNKVVKLSLKPYRFDVYLDNGVYKFVTVKNLDVIKKENYYEVNSKCYEEAKKLKKISNQAEFIASFYNNDLIKINGELYRVIGVNNDLLNRIEVNMIDITYREYLENMNDKRPPRIIKTIASKTQSIKKYSTDILGNLYEVKSKKHPQIIKKG

SEQ ID NO: 34371 - protein, 1053 aa, synthetic construct
MKRNYILGLDIGITSVGYGIIDYETRDVIDAGVRLFKEANVENNEGRRSKRGARRLKRRRRHRIQRVKKLLFDYNLLTDHSELSGINPYEARVKGLSQKLSEEEFSAALLHLAKRRGVHNVNEVEEDTGNELSTKEQISRNSKALEEKYVAELQLERLKKDGEVRGSINRFKTSDYVKEAKQLLKVQKAYHQLDQSFIDTYIDLLETRRTYYEGPGEGSPFGWKDIKEWYEMLMGHCTYFPEELRSVKYAYNADLYNALNDLNNLVITRDENEKLEYYEKFQIIENVFKQKKKPTLKQIAKEILVNEEDIKGYRVTSTGKPEFTNLKVYHDIKDITARKEIIENAELLDQIAKILTIYQSSEDIQEELTNLNSELTQEEIEQISNLKGYTGTHNLSLKAINLILDELWHTNDNQIAIFNRLKLVPKKVDLSQQKEIPTTLVDDFILSPVVKRSFIQSIKVINAIIKKYGLPNDIIIELAREKNSKDAQKMINEMQKRNRQTNERIEEIIRTTGKENAKYLIEKIKLHDMQEGKCLYSLEAIPLEDLLNNPFNYEVDHIIPRSVSFDNSFNNKVLVKQEEASKKGNRTPFQYLSSSDSKISYETFKKHILNLAKGKGRISKTKKEYLLEERDINRFSVQKDFINRNLVDTRYATRGLMNLLRSYFRVNNLDVKVKSINGGFTSFLRRKWKFKKERNKGYKHHAEDALIIANADFIFKEWKKLDKAKKVMENQMFEEKQAESMPEIETEQEYKEIFITPHQIKHIKDFKDYKYSHRVDKKPNRELINDTLYSTRKDDKGNTLIVNNLNGLYDKDNDKLKKLINKSPEKLLMYHHDPQTYQKLKLIMEQYGDEKNPLYKYYEETGNYLTKYSKKDNGPVIKKIKYYGNKLNAHLDITDDYPNSRNKVVKLSLKPYRFDVYLDNGVYKFVTVKNLDVIKKENYYEVNSKCYEEAKKLKKISNQAEFIASFYNNDLIKINGELYRVIGVNNDLLNRIEVNMIDITYREYLENMNDKRPPRIIKTIASKTQSIKKYSTDILGNLYEVKSKKHPQIIKKG

SEQ ID NO: 34372 - protein, 1052 aa, synthetic construct
KRNYILGLDIGITSVGYGIIDYETRDVIDAGVRLFKEANVENNEGRRSKRGARRLKRRRRHRIQRVKKLLFDYNLLTDHSELSGINPYEARVKGLSQKLSEEEFSAALLHLAKRRGVHNVNEVEEDTGNELSTKEQISRNSKALEEKYVAELQLERLKKDGEVRGSINRFKTSDYVKEAKQLLKVQKAYHQLDQSFIDTYIDLLETRRTYYEGPGEGSPFGWKDIKEWYEMLMGHCTYFPEELRSVKYAYNADLYNALNDLNNLVITRDENEKLEYYEKFQIIENVFKQKKKPTLKQIAKEILVNEEDIKGYRVTSTGKPEFTNLKVYHDIKDITARKEIIENAELLDQIAKILTIYQSSEDIQEELTNLNSELTQEEIEQISNLKGYTGTHNLSLKAINLILDELWHTNDNQIAIFNRLKLVPKKVDLSQQKEIPTTLVDDFILSPVVKRSFIQSIKVINAIIKKYGLPNDIIIELAREKNSKDAQKMINEMQKRNRQTNERIEEIIRTTGKENAKYLIEKIKLHDMQEGKCLYSLEAIPLEDLLNNPFNYEVDHIIPRSVSFDNSFNNKVLVKQEEASKKGNRTPFQYLSSSDSKISYETFKKHILNLAKGKGRISKTKKEYLLEERDINRFSVQKDFINRNLVDTRYATRGLMNLLRSYFRVNNLDVKVKSINGGFTSFLRRKWKFKKERNKGYKHHAEDALIIANADFIFKEWKKLDKAKKVMENQMFEEKQAESMPEIETEQEYKEIFITPHQIKHIKDFKDYKYSHRVDKKPNRELINDTLYSTRKDDKGNTLIVNNLNGLYDKDNDKLKKLINKSPEKLLMYHHDPQTYQKLKLIMEQYGDEKNPLYKYYEETGNYLTKYSKKDNGPVIKKIKYYGNKLNAHLDITDDYPNSRNKVVKLSLKPYRFDVYLDNGVYKFVTVKNLDVIKKENYYEVNSKCYEEAKKLKKISNQAEFIASFYNNDLIKINGELYRVIGVNNDLLNRIEVNMIDITYREYLENMNDKRPPRIIKTIASKTQSIKKYSTDILGNLYEVKSKKHPQIIKKG

SEQ ID NO: 34373 - protein, 1368 aa, synthetic construct
MDKKYSIGLDIGTNSVGWAVITDEYKVPSKKFKVLGNTDRHSIKKNLIGALLFDSGETAEATRLKRTARRRYTRRKNRICYLQEIFSNEMAKVDDSFFHRLEESFLVEEDKKHERHPIFGNIVDEVAYHEKYPTIYHLRKKLVDSTDKADLRLIYLALAHMIKFRGHFLIEGDLNPDNSDVDKLFIQLVQTYNQLFEENPINASGVDAKAILSARLSKSRRLENLIAQLPGEKKNGLFGNLIALSLGLTPNFKSNFDLAEDAKLQLSKDTYDDDLDNLLAQIGDQYADLFLAAKNLSDAILLSDILRVNTEITKAPLSASMIKRYDEHHQDLTLLKALVRQQLPEKYKEIFFDQSKNGYAGYIDGGASQEEFYKFIKPILEKMDGTEELLVKLNREDLLRKQRTFDNGSIPHQIHLGELHAILRRQEDFYPFLKDNREKIEKILTFRIPYYVGPLARGNSRFAWMTRKSEETITPWNFEEVVDKGASAQSFIERMTNFDKNLPNEKVLPKHSLLYEYFTVYNELTKVKYVTEGMRKPAFLSGEQKKAIVDLLFKTNRKVTVKQLKEDYFKKIECFDSVEISGVEDRFNASLGTYHDLLKIIKDKDFLDNEENEDILEDIVLTLTLFEDREMIEERLKTYAHLFDDKVMKQLKRRRYTGWGRLSRKLINGIRDKQSGKTILDFLKSDGFANRNFMQLIHDDSLTFKEDIQKAQVSGQGDSLHEHIANLAGSPAIKKGILQTVKVVDELVKVMGRHKPENIVIEMARENQTTQKGQKNSRERMKRIEEGIKELGSQILKEHPVENTQLQNEKLYLYYLQNGRDMYVDQELDINRLSDYDVDHIVPQSFLKDDSIDNKVLTRSDKNRGKSDNVPSEEVVKKMKNYWRQLLNAKLITQRKFDNLTKAERGGLSELDKAGFIKRQLVETRQITKHVAQILDSRMNTKYDENDKLIREVKVITLKSKLVSDFRKDFQFYKVREINNYHHAHDAYLNAVVGTALIKKYPKLESEFVYGDYKVYDVRKMIAKSEQEIGKATAKYFFYSNIMNFFKTEITLANGEIRKRPLIETNGETGEIVWDKGRDFATVRKVLSMPQVNIVKKTEVQTGGFSKESIRPKRNSDKLIARKKDWDPKKYGGFVSPTVAYSVLVVAKVEKGKSKKLKSVKELLGITIMERSSFEKNPIDFLEAKGYKEVKKDLIIKLPKYSLFELENGRKRMLASARFLQKGNELALPSKYVNFLYLASHYEKLKGSPEDNEQKQLFVEQHKHYLDEIIEQISEFSKRVILADANLDKVLSAYNKHRDKPIREQAENIIHLFTLTNLGAPRAFKYFDTTIDRKVYRSTKEVLDATLIHQSITGLYETRIDLSQLGGD

SEQ ID NO: 34374 - protein, 1368 aa, synthetic construct
MDKKYSIGLDIGTNSVGWAVITDEYKVPSKKFKVLGNTDRHSIKKNLIGALLFDSGETAEATRLKRTARRRYTRRKNRICYLQEIFSNEMAKVDDSFFHRLEESFLVEEDKKHERHPIFGNIVDEVAYHEKYPTIYHLRKKLVDSTDKADLRLIYLALAHMIKFRGHFLIEGDLNPDNSDVDKLFIQLVQTYNQLFEENPINASGVDAKAILSARLSKSRRLENLIAQLPGEKKNGLFGNLIALSLGLTPNFKSNFDLAEDAKLQLSKDTYDDDLDNLLAQIGDQYADLFLAAKNLSDAILLSDILRVNTEITKAPLSASMIKRYDEHHQDLTLLKALVRQQLPEKYKEIFFDQSKNGYAGYIDGGASQEEFYKFIKPILEKMDGTEELLVKLNREDLLRKQRTFDNGSIPHQIHLGELHAILRRQEDFYPFLKDNREKIEKILTFRIPYYVGPLARGNSRFAWMTRKSEETITPWNFEEVVDKGASAQSFIERMTNFDKNLPNEKVLPKHSLLYEYFTVYNELTKVKYVTEGMRKPAFLSGEQKKAIVDLLFKTNRKVTVKQLKEDYFKKIECFDSVEISGVEDRFNASLGTYHDLLKIIKDKDFLDNEENEDILEDIVLTLTLFEDREMIEERLKTYAHLFDDKVMKQLKRRRYTGWGRLSRKLINGIRDKQSGKTILDFLKSDGFANRNFMQLIHDDSLTFKEDIQKAQVSGQGDSLHEHIANLAGSPAIKKGILQTVKVVDELVKVMGRHKPENIVIEMARENQTTQKGQKNSRERMKRIEEGIKELGSQILKEHPVENTQLQNEKLYLYYLQNGRDMYVDQELDINRLSDYDVDAIVPQSFLKDDSIDNKVLTRSDKNRGKSDNVPSEEVVKKMKNYWRQLLNAKLITQRKFDNLTKAERGGLSELDKAGFIKRQLVETRQITKHVAQILDSRMNTKYDENDKLIREVKVITLKSKLVSDFRKDFQFYKVREINNYHHAHDAYLNAVVGTALIKKYPKLESEFVYGDYKVYDVRKMIAKSEQEIGKATAKYFFYSNIMNFFKTEITLANGEIRKRPLIETNGETGEIVWDKGRDFATVRKVLSMPQVNIVKKTEVQTGGFSKESIRPKRNSDKLIARKKDWDPKKYGGFVSPTVAYSVLVVAKVEKGKSKKLKSVKELLGITIMERSSFEKNPIDFLEAKGYKEVKKDLIIKLPKYSLFELENGRKRMLASARFLQKGNELALPSKYVNFLYLASHYEKLKGSPEDNEQKQLFVEQHKHYLDEIIEQISEFSKRVILADANLDKVLSAYNKHRDKPIREQAENIIHLFTLTNLGAPRAFKYFDTTIDRKVYRSTKEVLDATLIHQSITGLYETRIDLSQLGGD

SEQ ID NO: 34375 - protein, 1367 aa, synthetic construct
DKKYSIGLDIGTNSVGWAVITDEYKVPSKKFKVLGNTDRHSIKKNLIGALLFDSGETAEATRLKRTARRRYTRRKNRICYLQEIFSNEMAKVDDSFFHRLEESFLVEEDKKHERHPIFGNIVDEVAYHEKYPTIYHLRKKLVDSTDKADLRLIYLALAHMIKFRGHFLIEGDLNPDNSDVDKLFIQLVQTYNQLFEENPINASGVDAKAILSARLSKSRRLENLIAQLPGEKKNGLFGNLIALSLGLTPNFKSNFDLAEDAKLQLSKDTYDDDLDNLLAQIGDQYADLFLAAKNLSDAILLSDILRVNTEITKAPLSASMIKRYDEHHQDLTLLKALVRQQLPEKYKEIFFDQSKNGYAGYIDGGASQEEFYKFIKPILEKMDGTEELLVKLNREDLLRKQRTFDNGSIPHQIHLGELHAILRRQEDFYPFLKDNREKIEKILTFRIPYYVGPLARGNSRFAWMTRKSEETITPWNFEEVVDKGASAQSFIERMTNFDKNLPNEKVLPKHSLLYEYFTVYNELTKVKYVTEGMRKPAFLSGEQKKAIVDLLFKTNRKVTVKQLKEDYFKKIECFDSVEISGVEDRFNASLGTYHDLLKIIKDKDFLDNEENEDILEDIVLTLTLFEDREMIEERLKTYAHLFDDKVMKQLKRRRYTGWGRLSRKLINGIRDKQSGKTILDFLKSDGFANRNFMQLIHDDSLTFKEDIQKAQVSGQGDSLHEHIANLAGSPAIKKGILQTVKVVDELVKVMGRHKPENIVIEMARENQTTQKGQKNSRERMKRIEEGIKELGSQILKEHPVENTQLQNEKLYLYYLQNGRDMYVDQELDINRLSDYDVDAIVPQSFLKDDSIDNKVLTRSDKNRGKSDNVPSEEVVKKMKNYWRQLLNAKLITQRKFDNLTKAERGGLSELDKAGFIKRQLVETRQITKHVAQILDSRMNTKYDENDKLIREVKVITLKSKLVSDFRKDFQFYKVREINNYHHAHDAYLNAVVGTALIKKYPKLESEFVYGDYKVYDVRKMIAKSEQEIGKATAKYFFYSNIMNFFKTEITLANGEIRKRPLIETNGETGEIVWDKGRDFATVRKVLSMPQVNIVKKTEVQTGGFSKESIRPKRNSDKLIARKKDWDPKKYGGFVSPTVAYSVLVVAKVEKGKSKKLKSVKELLGITIMERSSFEKNPIDFLEAKGYKEVKKDLIIKLPKYSLFELENGRKRMLASARFLQKGNELALPSKYVNFLYLASHYEKLKGSPEDNEQKQLFVEQHKHYLDEIIEQISEFSKRVILADANLDKVLSAYNKHRDKPIREQAENIIHLFTLTNLGAPRAFKYFDTTIDRKVYRSTKEVLDATLIHQSITGLYETRIDLSQLGGD

SEQ ID NO: 34376 - protein, 1368 aa, synthetic construct
MDKKYSIGLDIGTNSVGWAVITDEYKVPSKKFKVLGNTDRHSIKKNLIGALLFDSGETAEATRLKRTARRRYTRRKNRICYLQEIFSNEMAKVDDSFFHRLEESFLVEEDKKHERHPIFGNIVDEVAYHEKYPTIYHLRKKLVDSTDKADLRLIYLALAHMIKFRGHFLIEGDLNPDNSDVDKLFIQLVQTYNQLFEENPINASGVDAKAILSARLSKSRRLENLIAQLPGEKKNGLFGNLIALSLGLTPNFKSNFDLAEDAKLQLSKDTYDDDLDNLLAQIGDQYADLFLAAKNLSDAILLSDILRVNTEITKAPLSASMIKRYDEHHQDLTLLKALVRQQLPEKYKEIFFDQSKNGYAGYIDGGASQEEFYKFIKPILEKMDGTEELLVKLNREDLLRKQRTFDNGSIPHQIHLGELHAILRRQEDFYPFLKDNREKIEKILTFRIPYYVGPLARGNSRFAWMTRKSEETITPWNFEEVVDKGASAQSFIERMTNFDKNLPNEKVLPKHSLLYEYFTVYNELTKVKYVTEGMRKPAFLSGEQKKAIVDLLFKTNRKVTVKQLKEDYFKKIECFDSVEISGVEDRFNASLGTYHDLLKIIKDKDFLDNEENEDILEDIVLTLTLFEDREMIEERLKTYAHLFDDKVMKQLKRRRYTGWGRLSRKLINGIRDKQSGKTILDFLKSDGFANRNFMQLIHDDSLTFKEDIQKAQVSGQGDSLHEHIANLAGSPAIKKGILQTVKVVDELVKVMGRHKPENIVIEMARENQTTQKGQKNSRERMKRIEEGIKELGSQILKEHPVENTQLQNEKLYLYYLQNGRDMYVDQELDINRLSDYDVDHIVPQSFLKDDSIDNKVLTRSDKNRGKSDNVPSEEVVKKMKNYWRQLLNAKLITQRKFDNLTKAERGGLSELDKAGFIKRQLVETRQITKHVAQILDSRMNTKYDENDKLIREVKVITLKSKLVSDFRKDFQFYKVREINNYHHAHDAYLNAVVGTALIKKYPKLESEFVYGDYKVYDVRKMIAKSEQEIGKATAKYFFYSNIMNFFKTEITLANGEIRKRPLIETNGETGEIVWDKGRDFATVRKVLSMPQVNIVKKTEVQTGGFSKESILPKRNSDKLIARKKDWDPKKYGGFVSPTVAYSVLVVAKVEKGKSKKLKSVKELLGITIMERSSFEKNPIDFLEAKGYKEVKKDLIIKLPKYSLFELENGRKRMLASARELQKGNELALPSKYVNFLYLASHYEKLKGSPEDNEQKQLFVEQHKHYLDEIIEQISEFSKRVILADANLDKVLSAYNKHRDKPIREQAENIIHLFTLTNLGAPAAFKYFDTTIDRKQYRSTKEVLDATLIHQSITGLYETRIDLSQLGGD

SEQ ID NO: 34377 - protein, 1368 aa, synthetic construct
MDKKYSIGLDIGTNSVGWAVITDEYKVPSKKFKVLGNTDRHSIKKNLIGALLFDSGETAEATRLKRTARRRYTRRKNRICYLQEIFSNEMAKVDDSFFHRLEESFLVEEDKKHERHPIFGNIVDEVAYHEKYPTIYHLRKKLVDSTDKADLRLIYLALAHMIKFRGHFLIEGDLNPDNSDVDKLFIQLVQTYNQLFEENPINASGVDAKAILSARLSKSRRLENLIAQLPGEKKNGLFGNLIALSLGLTPNFKSNFDLAEDAKLQLSKDTYDDDLDNLLAQIGDQYADLFLAAKNLSDAILLSDILRVNTEITKAPLSASMIKRYDEHHQDLTLLKALVRQQLPEKYKEIFFDQSKNGYAGYIDGGASQEEFYKFIKPILEKMDGTEELLVKLNREDLLRKQRTFDNGSIPHQIHLGELHAILRRQEDFYPFLKDNREKIEKILTFRIPYYVGPLARGNSRFAWMTRKSEETITPWNFEEVVDKGASAQSFIERMTNFDKNLPNEKVLPKHSLLYEYFTVYNELTKVKYVTEGMRKPAFLSGEQKKAIVDLLFKTNRKVTVKQLKEDYFKKIECFDSVEISGVEDRFNASLGTYHDLLKIIKDKDFLDNEENEDILEDIVLTLTLFEDREMIEERLKTYAHLFDDKVMKQLKRRRYTGWGRLSRKLINGIRDKQSGKTILDFLKSDGFANRNFMQLIHDDSLTFKEDIQKAQVSGQGDSLHEHIANLAGSPAIKKGILQTVKVVDELVKVMGRHKPENIVIEMARENQTTQKGQKNSRERMKRIEEGIKELGSQILKEHPVENTQLQNEKLYLYYLQNGRDMYVDQELDINRLSDYDVDAIVPQSFLKDDSIDNKVLTRSDKNRGKSDNVPSEEVVKKMKNYWRQLLNAKLITQRKFDNLTKAERGGLSELDKAGFIKRQLVETRQITKHVAQILDSRMNTKYDENDKLIREVKVITLKSKLVSDFRKDFQFYKVREINNYHHAHDAYLNAVVGTALIKKYPKLESEFVYGDYKVYDVRKMIAKSEQEIGKATAKYFFYSNIMNFFKTEITLANGEIRKRPLIETNGETGEIVWDKGRDFATVRKVLSMPQVNIVKKTEVQTGGFSKESILPKRNSDKLIARKKDWDPKKYGGFVSPTVAYSVLVVAKVEKGKSKKLKSVKELLGITIMERSSFEKNPIDFLEAKGYKEVKKDLIIKLPKYSLFELENGRKRMLASARELQKGNELALPSKYVNFLYLASHYEKLKGSPEDNEQKQLFVEQHKHYLDEIIEQISEFSKRVILADANLDKVLSAYNKHRDKPIREQAENIIHLFTLTNLGAPAAFKYFDTTIDRKQYRSTKEVLDATLIHQSITGLYETRIDLSQLGGD

SEQ ID NO: 34378 - protein, 1367 aa, synthetic construct
DKKYSIGLDIGTNSVGWAVITDEYKVPSKKFKVLGNTDRHSIKKNLIGALLFDSGETAEATRLKRTARRRYTRRKNRICYLQEIFSNEMAKVDDSFFHRLEESFLVEEDKKHERHPIFGNIVDEVAYHEKYPTIYHLRKKLVDSTDKADLRLIYLALAHMIKFRGHFLIEGDLNPDNSDVDKLFIQLVQTYNQLFEENPINASGVDAKAILSARLSKSRRLENLIAQLPGEKKNGLFGNLIALSLGLTPNFKSNFDLAEDAKLQLSKDTYDDDLDNLLAQIGDQYADLFLAAKNLSDAILLSDILRVNTEITKAPLSASMIKRYDEHHQDLTLLKALVRQQLPEKYKEIFFDQSKNGYAGYIDGGASQEEFYKFIKPILEKMDGTEELLVKLNREDLLRKQRTFDNGSIPHQIHLGELHAILRRQEDFYPFLKDNREKIEKILTFRIPYYVGPLARGNSRFAWMTRKSEETITPWNFEEVVDKGASAQSFIERMTNFDKNLPNEKVLPKHSLLYEYFTVYNELTKVKYVTEGMRKPAFLSGEQKKAIVDLLFKTNRKVTVKQLKEDYFKKIECFDSVEISGVEDRFNASLGTYHDLLKIIKDKDFLDNEENEDILEDIVLTLTLFEDREMIEERLKTYAHLFDDKVMKQLKRRRYTGWGRLSRKLINGIRDKQSGKTILDFLKSDGFANRNFMQLIHDDSLTFKEDIQKAQVSGQGDSLHEHIANLAGSPAIKKGILQTVKVVDELVKVMGRHKPENIVIEMARENQTTQKGQKNSRERMKRIEEGIKELGSQILKEHPVENTQLQNEKLYLYYLQNGRDMYVDQELDINRLSDYDVDAIVPQSFLKDDSIDNKVLTRSDKNRGKSDNVPSEEVVKKMKNYWRQLLNAKLITQRKFDNLTKAERGGLSELDKAGFIKRQLVETRQITKHVAQILDSRMNTKYDENDKLIREVKVITLKSKLVSDFRKDFQFYKVREINNYHHAHDAYLNAVVGTALIKKYPKLESEFVYGDYKVYDVRKMIAKSEQEIGKATAKYFFYSNIMNFFKTEITLANGEIRKRPLIETNGETGEIVWDKGRDFATVRKVLSMPQVNIVKKTEVQTGGFSKESILPKRNSDKLIARKKDWDPKKYGGFVSPTVAYSVLVVAKVEKGKSKKLKSVKELLGITIMERSSFEKNPIDFLEAKGYKEVKKDLIIKLPKYSLFELENGRKRMLASARELQKGNELALPSKYVNFLYLASHYEKLKGSPEDNEQKQLFVEQHKHYLDEIIEQISEFSKRVILADANLDKVLSAYNKHRDKPIREQAENIIHLFTLTNLGAPAAFKYFDTTIDRKQYRSTKEVLDATLIHQSITGLYETRIDLSQLGGD

SEQ ID NO: 34379 - protein, 1368 aa, synthetic construct
MDKKYSIGLDIGTNSVGWAVITDEYKVPSKKFKVLGNTDRHSIKKNLIGALLFDSGETAERTRLKRTARRRYTRRKNRICYLQEIFSNEMAKVDDSFFHRLEESFLVEEDKKHERHPIFGNIVDEVAYHEKYPTIYHLRKKLVDSTDKADLRLIYLALAHMIKFRGHFLIEGDLNPDNSDVDKLFIQLVQTYNQLFEENPINASGVDAKAILSARLSKSRRLENLIAQLPGEKKNGLFGNLIALSLGLTPNFKSNFDLAEDAKLQLSKDTYDDDLDNLLAQIGDQYADLFLAAKNLSDAILLSDILRVNTEITKAPLSASMIKRYDEHHQDLTLLKALVRQQLPEKYKEIFFDQSKNGYAGYIDGGASQEEFYKFIKPILEKMDGTEELLVKLNREDLLRKQRTFDNGSIPHQIHLGELHAILRRQEDFYPFLKDNREKIEKILTFRIPYYVGPLARGNSRFAWMTRKSEETITPWNFEEVVDKGASAQSFIERMTNFDKNLPNEKVLPKHSLLYEYFTVYNELTKVKYVTEGMRKPAFLSGEQKKAIVDLLFKTNRKVTVKQLKEDYFKKIECFDSVEISGVEDRFNASLGTYHDLLKIIKDKDFLDNEENEDILEDIVLTLTLFEDREMIEERLKTYAHLFDDKVMKQLKRRRYTGWGRLSRKLINGIRDKQSGKTILDFLKSDGFANRNFMQLIHDDSLTFKEDIQKAQVSGQGDSLHEHIANLAGSPAIKKGILQTVKVVDELVKVMGRHKPENIVIEMARENQTTQKGQKNSRERMKRIEEGIKELGSQILKEHPVENTQLQNEKLYLYYLQNGRDMYVDQELDINRLSDYDVDHIVPQSFLKDDSIDNKVLTRSDKNRGKSDNVPSEEVVKKMKNYWRQLLNAKLITQRKFDNLTKAERGGLSELDKAGFIKRQLVETRQITKHVAQILDSRMNTKYDENDKLIREVKVITLKSKLVSDFRKDFQFYKVREINNYHHAHDAYLNAVVGTALIKKYPKLESEFVYGDYKVYDVRKMIAKSEQEIGKATAKYFFYSNIMNFFKTEITLANGEIRKRPLIETNGETGEIVWDKGRDFATVRKVLSMPQVNIVKKTEVQTGGFSKESIRPKRNSDKLIARKKDWDPKKYGGFLWPTVAYSVLVVAKVEKGKSKKLKSVKELLGITIMERSSFEKNPIDFLEAKGYKEVKKDLIIKLPKYSLFELENGRKRMLASAKQLQKGNELALPSKYVNFLYLASHYEKLKGSPEDNEQKQLFVEQHKHYLDEIIEQISEFSKRVILADANLDKVLSAYNKHRDKPIREQAENIIHLFTLTRLGAPRAFKYFDTTIDPKQYRSTKEVLDATLIHQSITGLYETRIDLSQLGGD

SEQ ID NO: 34380 - protein, 1368 aa, synthetic construct
MDKKYSIGLDIGTNSVGWAVITDEYKVPSKKFKVLGNTDRHSIKKNLIGALLFDSGETAERTRLKRTARRRYTRRKNRICYLQEIFSNEMAKVDDSFFHRLEESFLVEEDKKHERHPIFGNIVDEVAYHEKYPTIYHLRKKLVDSTDKADLRLIYLALAHMIKFRGHFLIEGDLNPDNSDVDKLFIQLVQTYNQLFEENPINASGVDAKAILSARLSKSRRLENLIAQLPGEKKNGLFGNLIALSLGLTPNFKSNFDLAEDAKLQLSKDTYDDDLDNLLAQIGDQYADLFLAAKNLSDAILLSDILRVNTEITKAPLSASMIKRYDEHHQDLTLLKALVRQQLPEKYKEIFFDQSKNGYAGYIDGGASQEEFYKFIKPILEKMDGTEELLVKLNREDLLRKQRTFDNGSIPHQIHLGELHAILRRQEDFYPFLKDNREKIEKILTFRIPYYVGPLARGNSRFAWMTRKSEETITPWNFEEVVDKGASAQSFIERMTNFDKNLPNEKVLPKHSLLYEYFTVYNELTKVKYVTEGMRKPAFLSGEQKKAIVDLLFKTNRKVTVKQLKEDYFKKIECFDSVEISGVEDRFNASLGTYHDLLKIIKDKDFLDNEENEDILEDIVLTLTLFEDREMIEERLKTYAHLFDDKVMKQLKRRRYTGWGRLSRKLINGIRDKQSGKTILDFLKSDGFANRNFMQLIHDDSLTFKEDIQKAQVSGQGDSLHEHIANLAGSPAIKKGILQTVKVVDELVKVMGRHKPENIVIEMARENQTTQKGQKNSRERMKRIEEGIKELGSQILKEHPVENTQLQNEKLYLYYLQNGRDMYVDQELDINRLSDYDVDAIVPQSFLKDDSIDNKVLTRSDKNRGKSDNVPSEEVVKKMKNYWRQLLNAKLITQRKFDNLTKAERGGLSELDKAGFIKRQLVETRQITKHVAQILDSRMNTKYDENDKLIREVKVITLKSKLVSDFRKDFQFYKVREINNYHHAHDAYLNAVVGTALIKKYPKLESEFVYGDYKVYDVRKMIAKSEQEIGKATAKYFFYSNIMNFFKTEITLANGEIRKRPLIETNGETGEIVWDKGRDFATVRKVLSMPQVNIVKKTEVQTGGFSKESIRPKRNSDKLIARKKDWDPKKYGGFLWPTVAYSVLVVAKVEKGKSKKLKSVKELLGITIMERSSFEKNPIDFLEAKGYKEVKKDLIIKLPKYSLFELENGRKRMLASAKQLQKGNELALPSKYVNFLYLASHYEKLKGSPEDNEQKQLFVEQHKHYLDEIIEQISEFSKRVILADANLDKVLSAYNKHRDKPIREQAENIIHLFTLTRLGAPRAFKYFDTTIDPKQYRSTKEVLDATLIHQSITGLYETRIDLSQLGGD

SEQ ID NO: 34381 - protein, 1367 aa, synthetic construct
DKKYSIGLDIGTNSVGWAVITDEYKVPSKKFKVLGNTDRHSIKKNLIGALLFDSGETAERTRLKRTARRRYTRRKNRICYLQEIFSNEMAKVDDSFFHRLEESFLVEEDKKHERHPIFGNIVDEVAYHEKYPTIYHLRKKLVDSTDKADLRLIYLALAHMIKFRGHFLIEGDLNPDNSDVDKLFIQLVQTYNQLFEENPINASGVDAKAILSARLSKSRRLENLIAQLPGEKKNGLFGNLIALSLGLTPNFKSNFDLAEDAKLQLSKDTYDDDLDNLLAQIGDQYADLFLAAKNLSDAILLSDILRVNTEITKAPLSASMIKRYDEHHQDLTLLKALVRQQLPEKYKEIFFDQSKNGYAGYIDGGASQEEFYKFIKPILEKMDGTEELLVKLNREDLLRKQRTFDNGSIPHQIHLGELHAILRRQEDFYPFLKDNREKIEKILTFRIPYYVGPLARGNSRFAWMTRKSEETITPWNFEEVVDKGASAQSFIERMTNFDKNLPNEKVLPKHSLLYEYFTVYNELTKVKYVTEGMRKPAFLSGEQKKAIVDLLFKTNRKVTVKQLKEDYFKKIECFDSVEISGVEDRFNASLGTYHDLLKIIKDKDFLDNEENEDILEDIVLTLTLFEDREMIEERLKTYAHLFDDKVMKQLKRRRYTGWGRLSRKLINGIRDKQSGKTILDFLKSDGFANRNFMQLIHDDSLTFKEDIQKAQVSGQGDSLHEHIANLAGSPAIKKGILQTVKVVDELVKVMGRHKPENIVIEMARENQTTQKGQKNSRERMKRIEEGIKELGSQILKEHPVENTQLQNEKLYLYYLQNGRDMYVDQELDINRLSDYDVDAIVPQSFLKDDSIDNKVLTRSDKNRGKSDNVPSEEVVKKMKNYWRQLLNAKLITQRKFDNLTKAERGGLSELDKAGFIKRQLVETRQITKHVAQILDSRMNTKYDENDKLIREVKVITLKSKLVSDFRKDFQFYKVREINNYHHAHDAYLNAVVGTALIKKYPKLESEFVYGDYKVYDVRKMIAKSEQEIGKATAKYFFYSNIMNFFKTEITLANGEIRKRPLIETNGETGEIVWDKGRDFATVRKVLSMPQVNIVKKTEVQTGGFSKESIRPKRNSDKLIARKKDWDPKKYGGFLWPTVAYSVLVVAKVEKGKSKKLKSVKELLGITIMERSSFEKNPIDFLEAKGYKEVKKDLIIKLPKYSLFELENGRKRMLASAKQLQKGNELALPSKYVNFLYLASHYEKLKGSPEDNEQKQLFVEQHKHYLDEIIEQISEFSKRVILADANLDKVLSAYNKHRDKPIREQAENIIHLFTLTRLGAPRAFKYFDTTIDPKQYRSTKEVLDATLIHQSITGLYETRIDLSQLGGD

SEQ ID NO: 34382 - protein, 1057 aa, synthetic construct
MNQKFILGLDIGITSVGYGLIDYETKNIIDAGVRLFPEANVENNEGRRSKRGSRRLKRRRIHRLERVKLLLTEYDLINKEQIPTSNNPYQIRVKGLSEILSKDELAIALLHLAKRRGIHNVDVAADKEETASDSLSTKDQINKNAKFLESRYVCELQKERLENEGHVRGVENRFLTKDIVREAKKIIDTQMQYYPEIDETFKEKYISLVETRREYFEGPGQGSPFGWNGDLKKWYEMLMGHCTYFPQELRSVKYAYSADLFNALNDLNNLIIQRDNSEKLEYHEKYHIIENVFKQKKKPTLKQIAKEIGVNPEDIKGYRITKSGTPEFTSFKLFHDLKKVVKDHAILDDIDLLNQIAEILTIYQDKDSIVAELGQLEYLMSEADKQSISELTGYTGTHSLSLKCMNMIIDELWHSSMNQMEVFTYLNMRPKKYELKGYQRIPTDMIDDAILSPVVKRTFIQSINVINKVIEKYGIPEDIIIELARENNSDDRKKFINNLQKKNEATRKRINEIIGQTGNQNAKRIVEKIRLHDQQEGKCLYSLESIPLEDLLNNPNHYEVDHIIPRSVSFDNSYHNKVLVKQSENSKKSNLTPYQYFNSGKSKLSYNQFKQHILNLSKSQDRISKKKKEYLLEERDINKFEVQKEFINRNLVDTRYATRELTNYLKAYFSANNMNVKVKTINGSFTDYLRKVWKFKKERNHGYKHHAEDALIIANADFLFKENKKLKAVNSVLEKPEIETKQLDIQVDSEDNYSEMFIIPKQVQDIKDFRNFKYSHRVDKKPNRQLINDTLYSTRKKDNSTYIVQTIKDIYAKDNTTLKKQFDKSPEKFLMYQHDPRTFEKLEVIMKQYANEKNPLAKYHEETGEYLTKYSKKNNGPIVKSLKYIGNKLGSHLDVTHQFKSSTKKLVKLSIKNYRFDVYLTEKGYKFVTIAYLNVFKKDNYYYIPKDKYQELKEKKKIKDTDQFIASFYKNDLIKLNGDLYKIIGVNSDDRNIIELDYYDIKYKDYCEINNIKGEPRIKKTIGKKTESIEKFTTDVLGNLYLHSTEKAPQLIFKRGL

SEQ ID NO: 34383 - protein, 1057 aa, synthetic construct
MNQKFILGLDIGITSVGYGLIDYETKNIIDAGVRLFPEANVENNEGRRSKRGSRRLKRRRIHRLERVKLLLTEYDLINKEQIPTSNNPYQIRVKGLSEILSKDELAIALLHLAKRRGIHNVDVAADKEETASDSLSTKDQINKNAKFLESRYVCELQKERLENEGHVRGVENRFLTKDIVREAKKIIDTQMQYYPEIDETFKEKYISLVETRREYFEGPGQGSPFGWNGDLKKWYEMLMGHCTYFPQELRSVKYAYSADLFNALNDLNNLIIQRDNSEKLEYHEKYHIIENVFKQKKKPTLKQIAKEIGVNPEDIKGYRITKSGTPEFTSFKLFHDLKKVVKDHAILDDIDLLNQIAEILTIYQDKDSIVAELGQLEYLMSEADKQSISELTGYTGTHSLSLKCMNMIIDELWHSSMNQMEVFTYLNMRPKKYELKGYQRIPTDMIDDAILSPVVKRTFIQSINVINKVIEKYGIPEDIIIELARENNSDDRKKFINNLQKKNEATRKRINEIIGQTGNQNAKRIVEKIRLHDQQEGKCLYSLESIPLEDLLNNPNHYEVDHIIPRSVSFDNSYHNKVLVKQSEASKKSNLTPYQYFNSGKSKLSYNQFKQHILNLSKSQDRISKKKKEYLLEERDINKFEVQKEFINRNLVDTRYATRELTNYLKAYFSANNMNVKVKTINGSFTDYLRKVWKFKKERNHGYKHHAEDALIIANADFLFKENKKLKAVNSVLEKPEIETKQLDIQVDSEDNYSEMFIIPKQVQDIKDFRNFKYSHRVDKKPNRQLINDTLYSTRKKDNSTYIVQTIKDIYAKDNTTLKKQFDKSPEKFLMYQHDPRTFEKLEVIMKQYANEKNPLAKYHEETGEYLTKYSKKNNGPIVKSLKYIGNKLGSHLDVTHQFKSSTKKLVKLSIKNYRFDVYLTEKGYKFVTIAYLNVFKKDNYYYIPKDKYQELKEKKKIKDTDQFIASFYKNDLIKLNGDLYKIIGVNSDDRNIIELDYYDIKYKDYCEINNIKGEPRIKKTIGKKTESIEKFTTDVLGNLYLHSTEKAPQLIFKRGL

SEQ ID NO: 34384 - protein, 1056 aa, synthetic construct
NQKFILGLDIGITSVGYGLIDYETKNIIDAGVRLFPEANVENNEGRRSKRGSRRLKRRRIHRLERVKLLLTEYDLINKEQIPTSNNPYQIRVKGLSEILSKDELAIALLHLAKRRGIHNVDVAADKEETASDSLSTKDQINKNAKFLESRYVCELQKERLENEGHVRGVENRFLTKDIVREAKKIIDTQMQYYPEIDETFKEKYISLVETRREYFEGPGQGSPFGWNGDLKKWYEMLMGHCTYFPQELRSVKYAYSADLFNALNDLNNLIIQRDNSEKLEYHEKYHIIENVFKQKKKPTLKQIAKEIGVNPEDIKGYRITKSGTPEFTSFKLFHDLKKVVKDHAILDDIDLLNQIAEILTIYQDKDSIVAELGQLEYLMSEADKQSISELTGYTGTHSLSLKCMNMIIDELWHSSMNQMEVFTYLNMRPKKYELKGYQRIPTDMIDDAILSPVVKRTFIQSINVINKVIEKYGIPEDIIIELARENNSDDRKKFINNLQKKNEATRKRINEIIGQTGNQNAKRIVEKIRLHDQQEGKCLYSLESIPLEDLLNNPNHYEVDHIIPRSVSFDNSYHNKVLVKQSEASKKSNLTPYQYFNSGKSKLSYNQFKQHILNLSKSQDRISKKKKEYLLEERDINKFEVQKEFINRNLVDTRYATRELTNYLKAYFSANNMNVKVKTINGSFTDYLRKVWKFKKERNHGYKHHAEDALIIANADFLFKENKKLKAVNSVLEKPEIETKQLDIQVDSEDNYSEMFIIPKQVQDIKDFRNFKYSHRVDKKPNRQLINDTLYSTRKKDNSTYIVQTIKDIYAKDNTTLKKQFDKSPEKFLMYQHDPRTFEKLEVIMKQYANEKNPLAKYHEETGEYLTKYSKKNNGPIVKSLKYIGNKLGSHLDVTHQFKSSTKKLVKLSIKNYRFDVYLTEKGYKFVTIAYLNVFKKDNYYYIPKDKYQELKEKKKIKDTDQFIASFYKNDLIKLNGDLYKIIGVNSDDRNIIELDYYDIKYKDYCEINNIKGEPRIKKTIGKKTESIEKFTTDVLGNLYLHSTEKAPQLIFKRGL

SEQ ID NO: 34385 - protein, 1057 aa, synthetic construct
MNQKFILGLDIGITSVGYGLIDYETKNIIDAGVRLFPEANVENNEGRRSKRGSRRLKRRRIHRLERVKLLLTEYDLINKEQIPTSNNPYQIRVKGLSEILSKDELAIALLHLAKRRGIHNVDVAADKEETASDSLSTKDQINKNAKFLESRYVCELQKERLENEGHVRGVENRFLTKDIVREAKKIIDTQMQYYPEIDETFKEKYISLVETRREYFEGPGQGSPFGWNGDLKKWYEMLMGHCTYFPQELRSVKYAYSADLFNALNDLNNLIIQRDNSEKLEYHEKYHIIENVFKQKKKPTLKQIAKEIGVNPEDIKGYRITKSGTPEFTSFKLFHDLKKVVKDHAILDDIDLLNQIAEILTIYQDKDSIVAELGQLEYLMSEADKQSISELTGYTGTHSLSLKCMNMIIDELWHSSMNQMEVFTYLNMRPKKYELKGYQRIPTDMIDDAILSPVVKRTFIQSINVINKVIEKYGIPEDIIIELARENNSDDRKKFINNLQKKNEATRKRINEIIGQTGNQNAKRIVEKIRLHDQQEGKCLYSLESIPLEDLLNNPNHYEVDHIIPRSVSFDNSYHNKVLVKQSENSKKSNLTPYQYFNSGKSKLSYNQFKQHILNLSKSQDRISKKKKEYLLEERDINKFEVQKEFINRNLVDTRYATRELTSYLKAYFSANNMDVKVKTINGSFTNHLRKVWRFDKYRNHGYKHHAEDALIIANADFLFKENKKLQNTNKILEKPTIENNTKKVTVEKEEDYNNVFETPKLVEDIKQYRDYKFSHRVDKKPNRQLINDTLYSTRMKDEHDYIVQTITDIYGKDNTNLKKQFNKNPEKFLMYQNDPKTFEKLSIIMKQYSDEKNPLAKYYEETGEYLTKYSKKNNGPIVKKIKLLGNKVGNHLDVTNKYENSTKKLVKLSIKNYRFDVYLTEKGYKFVTIAYLNVFKKDNYYYIPKDKYQELKEKKKIKDTDQFIASFYKNDLIKLNGDLYKIIGVNSDDRNIIELDYYDIKYKDYCEINNIKGEPRIKKTIGKKTESIEKFTTDVLGNLYLHSTEKAPQLIFKRGL

SEQ ID NO: 34386 - protein, 1057 aa, synthetic construct
MNQKFILGLDIGITSVGYGLIDYETKNIIDAGVRLFPEANVENNEGRRSKRGSRRLKRRRIHRLERVKLLLTEYDLINKEQIPTSNNPYQIRVKGLSEILSKDELAIALLHLAKRRGIHNVDVAADKEETASDSLSTKDQINKNAKFLESRYVCELQKERLENEGHVRGVENRFLTKDIVREAKKIIDTQMQYYPEIDETFKEKYISLVETRREYFEGPGQGSPFGWNGDLKKWYEMLMGHCTYFPQELRSVKYAYSADLFNALNDLNNLIIQRDNSEKLEYHEKYHIIENVFKQKKKPTLKQIAKEIGVNPEDIKGYRITKSGTPEFTSFKLFHDLKKVVKDHAILDDIDLLNQIAEILTIYQDKDSIVAELGQLEYLMSEADKQSISELTGYTGTHSLSLKCMNMIIDELWHSSMNQMEVFTYLNMRPKKYELKGYQRIPTDMIDDAILSPVVKRTFIQSINVINKVIEKYGIPEDIIIELARENNSDDRKKFINNLQKKNEATRKRINEIIGQTGNQNAKRIVEKIRLHDQQEGKCLYSLESIPLEDLLNNPNHYEVDHIIPRSVSFDNSYHNKVLVKQSEASKKSNLTPYQYFNSGKSKLSYNQFKQHILNLSKSQDRISKKKKEYLLEERDINKFEVQKEFINRNLVDTRYATRELTSYLKAYFSANNMDVKVKTINGSFTNHLRKVWRFDKYRNHGYKHHAEDALIIANADFLFKENKKLQNTNKILEKPTIENNTKKVTVEKEEDYNNVFETPKLVEDIKQYRDYKFSHRVDKKPNRQLINDTLYSTRMKDEHDYIVQTITDIYGKDNTNLKKQFNKNPEKFLMYQNDPKTFEKLSIIMKQYSDEKNPLAKYYEETGEYLTKYSKKNNGPIVKKIKLLGNKVGNHLDVTNKYENSTKKLVKLSIKNYRFDVYLTEKGYKFVTIAYLNVFKKDNYYYIPKDKYQELKEKKKIKDTDQFIASFYKNDLIKLNGDLYKIIGVNSDDRNIIELDYYDIKYKDYCEINNIKGEPRIKKTIGKKTESIEKFTTDVLGNLYLHSTEKAPQLIFKRGL

SEQ ID NO: 34387 - protein, 1056 aa, synthetic construct
NQKFILGLDIGITSVGYGLIDYETKNIIDAGVRLFPEANVENNEGRRSKRGSRRLKRRRIHRLERVKLLLTEYDLINKEQIPTSNNPYQIRVKGLSEILSKDELAIALLHLAKRRGIHNVDVAADKEETASDSLSTKDQINKNAKFLESRYVCELQKERLENEGHVRGVENRFLTKDIVREAKKIIDTQMQYYPEIDETFKEKYISLVETRREYFEGPGQGSPFGWNGDLKKWYEMLMGHCTYFPQELRSVKYAYSADLFNALNDLNNLIIQRDNSEKLEYHEKYHIIENVFKQKKKPTLKQIAKEIGVNPEDIKGYRITKSGTPEFTSFKLFHDLKKVVKDHAILDDIDLLNQIAEILTIYQDKDSIVAELGQLEYLMSEADKQSISELTGYTGTHSLSLKCMNMIIDELWHSSMNQMEVFTYLNMRPKKYELKGYQRIPTDMIDDAILSPVVKRTFIQSINVINKVIEKYGIPEDIIIELARENNSDDRKKFINNLQKKNEATRKRINEIIGQTGNQNAKRIVEKIRLHDQQEGKCLYSLESIPLEDLLNNPNHYEVDHIIPRSVSFDNSYHNKVLVKQSEASKKSNLTPYQYFNSGKSKLSYNQFKQHILNLSKSQDRISKKKKEYLLEERDINKFEVQKEFINRNLVDTRYATRELTSYLKAYFSANNMDVKVKTINGSFTNHLRKVWRFDKYRNHGYKHHAEDALIIANADFLFKENKKLQNTNKILEKPTIENNTKKVTVEKEEDYNNVFETPKLVEDIKQYRDYKFSHRVDKKPNRQLINDTLYSTRMKDEHDYIVQTITDIYGKDNTNLKKQFNKNPEKFLMYQNDPKTFEKLSIIMKQYSDEKNPLAKYYEETGEYLTKYSKKNNGPIVKKIKLLGNKVGNHLDVTNKYENSTKKLVKLSIKNYRFDVYLTEKGYKFVTIAYLNVFKKDNYYYIPKDKYQELKEKKKIKDTDQFIASFYKNDLIKLNGDLYKIIGVNSDDRNIIELDYYDIKYKDYCEINNIKGEPRIKKTIGKKTESIEKFTTDVLGNLYLHSTEKAPQLIFKRGL

SEQ ID NO: 34388 - protein, 1368 aa, synthetic construct
MDKKYSIGLDIGTNSVGWAVITDEYKVPSKKFKVLGNTDRHSIKKNLIGALLFDSGETAEATRLKRTARRRYTRRKNRICYLQEIFSNEMAKVDDSFFHRLEESFLVEEDKKHERHPIFGNIVDEVAYHEKYPTIYHLRKKLVDSTDKADLRLIYLALAHMIKFRGHFLIEGDLNPDNSDVDKLFIQLVQTYNQLFEENPINASGVDAKAILSARLSKSRRLENLIAQLPGEKKNGLFGNLIALSLGLTPNFKSNFDLAEDAKLQLSKDTYDDDLDNLLAQIGDQYADLFLAAKNLSDAILLSDILRVNTEITKAPLSASMIKRYDEHHQDLTLLKALVRQQLPEKYKEIFFDQSKNGYAGYIDGGASQEEFYKFIKPILEKMDGTEELLVKLNREDLLRKQRTFDNGSIPHQIHLGELHAILRRQEDFYPFLKDNREKIEKILTFRIPYYVGPLARGNSRFAWMTRKSEETITPWNFEEVVDKGASAQSFIERMTNFDKNLPNEKVLPKHSLLYEYFTVYNELTKVKYVTEGMRKPAFLSGEQKKAIVDLLFKTNRKVTVKQLKEDYFKKIECFDSVEISGVEDRFNASLGTYHDLLKIIKDKDFLDNEENEDILEDIVLTLTLFEDREMIEERLKTYAHLFDDKVMKQLKRRRYTGWGRLSRKLINGIRDKQSGKTILDFLKSDGFANRNFMQLIHDDSLTFKEDIQKAQVSGQGDSLHEHIANLAGSPAIKKGILQTVKVVDELVKVMGRHKPENIVIEMARENQTTQKGQKNSRERMKRIEEGIKELGSQILKEHPVENTQLQNEKLYLYYLQNGRDMYVDQELDINRLSDYDVDHIVPQSFLKDDSIDNKVLTRSDKNRGKSDNVPSEEVVKKMKNYWRQLLNAKLITQRKFDNLTKAERGGLSELDKAGFIKRQLVETRQITKHVAQILDSRMNTKYDENDKLIREVKVITLKSKLVSDFRKDFQFYKVREINNYHHAHDAYLNAVVGTALIKKYPKLESEFVYGDYKVYDVRKMIAKSEQEIGKATAKYFFYSNIMNFFKTEITLANGEIRKRPLIETNGETGEIVWDKGRDFATVRKVLSMPQVNIVKKTEVQTGGFSKESILPKRNSDKLIARKKDWDPKKYGGFLWPTVAYSVLVVAKVEKGKSKKLKSVKELLGITIMERSSFEKNPIDFLEAKGYKEVKKDLIIKLPKYSLFELENGRKRMLASAKQLQKGNELALPSKYVNFLYLASHYEKLKGSPEDNEQKQLFVEQHKHYLDEIIEQISEFSKRVILADANLDKVLSAYNKHRDKPIREQAENIIHLFTLTNLGAPAAFKYFDTTIDRKQYRSTKEVLDATLIHQSITGLYETRIDLSQLGGD

SEQ ID NO: 34389 - protein, 1368 aa, synthetic construct
MDKKYSIGLDIGTNSVGWAVITDEYKVPSKKFKVLGNTDRHSIKKNLIGALLFDSGETAEATRLKRTARRRYTRRKNRICYLQEIFSNEMAKVDDSFFHRLEESFLVEEDKKHERHPIFGNIVDEVAYHEKYPTIYHLRKKLVDSTDKADLRLIYLALAHMIKFRGHFLIEGDLNPDNSDVDKLFIQLVQTYNQLFEENPINASGVDAKAILSARLSKSRRLENLIAQLPGEKKNGLFGNLIALSLGLTPNFKSNFDLAEDAKLQLSKDTYDDDLDNLLAQIGDQYADLFLAAKNLSDAILLSDILRVNTEITKAPLSASMIKRYDEHHQDLTLLKALVRQQLPEKYKEIFFDQSKNGYAGYIDGGASQEEFYKFIKPILEKMDGTEELLVKLNREDLLRKQRTFDNGSIPHQIHLGELHAILRRQEDFYPFLKDNREKIEKILTFRIPYYVGPLARGNSRFAWMTRKSEETITPWNFEEVVDKGASAQSFIERMTNFDKNLPNEKVLPKHSLLYEYFTVYNELTKVKYVTEGMRKPAFLSGEQKKAIVDLLFKTNRKVTVKQLKEDYFKKIECFDSVEISGVEDRFNASLGTYHDLLKIIKDKDFLDNEENEDILEDIVLTLTLFEDREMIEERLKTYAHLFDDKVMKQLKRRRYTGWGRLSRKLINGIRDKQSGKTILDFLKSDGFANRNFMQLIHDDSLTFKEDIQKAQVSGQGDSLHEHIANLAGSPAIKKGILQTVKVVDELVKVMGRHKPENIVIEMARENQTTQKGQKNSRERMKRIEEGIKELGSQILKEHPVENTQLQNEKLYLYYLQNGRDMYVDQELDINRLSDYDVDAIVPQSFLKDDSIDNKVLTRSDKNRGKSDNVPSEEVVKKMKNYWRQLLNAKLITQRKFDNLTKAERGGLSELDKAGFIKRQLVETRQITKHVAQILDSRMNTKYDENDKLIREVKVITLKSKLVSDFRKDFQFYKVREINNYHHAHDAYLNAVVGTALIKKYPKLESEFVYGDYKVYDVRKMIAKSEQEIGKATAKYFFYSNIMNFFKTEITLANGEIRKRPLIETNGETGEIVWDKGRDFATVRKVLSMPQVNIVKKTEVQTGGFSKESILPKRNSDKLIARKKDWDPKKYGGFLWPTVAYSVLVVAKVEKGKSKKLKSVKELLGITIMERSSFEKNPIDFLEAKGYKEVKKDLIIKLPKYSLFELENGRKRMLASAKQLQKGNELALPSKYVNFLYLASHYEKLKGSPEDNEQKQLFVEQHKHYLDEIIEQISEFSKRVILADANLDKVLSAYNKHRDKPIREQAENIIHLFTLTNLGAPAAFKYFDTTIDRKQYRSTKEVLDATLIHQSITGLYETRIDLSQLGGD

SEQ ID NO: 34390 - protein, 1367 aa, synthetic construct
DKKYSIGLDIGTNSVGWAVITDEYKVPSKKFKVLGNTDRHSIKKNLIGALLFDSGETAEATRLKRTARRRYTRRKNRICYLQEIFSNEMAKVDDSFFHRLEESFLVEEDKKHERHPIFGNIVDEVAYHEKYPTIYHLRKKLVDSTDKADLRLIYLALAHMIKFRGHFLIEGDLNPDNSDVDKLFIQLVQTYNQLFEENPINASGVDAKAILSARLSKSRRLENLIAQLPGEKKNGLFGNLIALSLGLTPNFKSNFDLAEDAKLQLSKDTYDDDLDNLLAQIGDQYADLFLAAKNLSDAILLSDILRVNTEITKAPLSASMIKRYDEHHQDLTLLKALVRQQLPEKYKEIFFDQSKNGYAGYIDGGASQEEFYKFIKPILEKMDGTEELLVKLNREDLLRKQRTFDNGSIPHQIHLGELHAILRRQEDFYPFLKDNREKIEKILTFRIPYYVGPLARGNSRFAWMTRKSEETITPWNFEEVVDKGASAQSFIERMTNFDKNLPNEKVLPKHSLLYEYFTVYNELTKVKYVTEGMRKPAFLSGEQKKAIVDLLFKTNRKVTVKQLKEDYFKKIECFDSVEISGVEDRFNASLGTYHDLLKIIKDKDFLDNEENEDILEDIVLTLTLFEDREMIEERLKTYAHLFDDKVMKQLKRRRYTGWGRLSRKLINGIRDKQSGKTILDFLKSDGFANRNFMQLIHDDSLTFKEDIQKAQVSGQGDSLHEHIANLAGSPAIKKGILQTVKVVDELVKVMGRHKPENIVIEMARENQTTQKGQKNSRERMKRIEEGIKELGSQILKEHPVENTQLQNEKLYLYYLQNGRDMYVDQELDINRLSDYDVDAIVPQSFLKDDSIDNKVLTRSDKNRGKSDNVPSEEVVKKMKNYWRQLLNAKLITQRKFDNLTKAERGGLSELDKAGFIKRQLVETRQITKHVAQILDSRMNTKYDENDKLIREVKVITLKSKLVSDFRKDFQFYKVREINNYHHAHDAYLNAVVGTALIKKYPKLESEFVYGDYKVYDVRKMIAKSEQEIGKATAKYFFYSNIMNFFKTEITLANGEIRKRPLIETNGETGEIVWDKGRDFATVRKVLSMPQVNIVKKTEVQTGGFSKESILPKRNSDKLIARKKDWDPKKYGGFLWPTVAYSVLVVAKVEKGKSKKLKSVKELLGITIMERSSFEKNPIDFLEAKGYKEVKKDLIIKLPKYSLFELENGRKRMLASAKQLQKGNELALPSKYVNFLYLASHYEKLKGSPEDNEQKQLFVEQHKHYLDEIIEQISEFSKRVILADANLDKVLSAYNKHRDKPIREQAENIIHLFTLTNLGAPAAFKYFDTTIDRKQYRSTKEVLDATLIHQSITGLYETRIDLSQLGGD

SEQ ID NO: 34391 - protein, 7 aa, synthetic construct
PKKKRKV

SEQ ID NO: 34392 - protein, 19 aa, synthetic construct
MKRTADGSEFESPKKKRKV

SEQ ID NO: 34393 - protein, 30 aa, synthetic construct
MDSLLMNRRKFLYQFKNVRWAKGRRETYLC

SEQ ID NO: 34394 - protein, 20 aa, synthetic construct
AVKRPAATKKAGQAKKKKLD

SEQ ID NO: 34395 - protein, 25 aa, synthetic construct
MSRRRKANPTKLSENAKKLAKEVEN

SEQ ID NO: 34396 - protein, 9 aa, synthetic construct
PAAKRVKLD

SEQ ID NO: 34397 - protein, 9 aa, synthetic construct
KLKIKRPVK

SEQ ID NO: 34398 - protein, 8 aa, synthetic construct
VSRKRPRP

SEQ ID NO: 34399 - protein, 10 aa, synthetic construct
EGAPPAKRAR

SEQ ID NO: 34400 - protein, 16 aa, synthetic construct
RQARRNRRRRWRERNR

SEQ ID NO: 34401 - protein, 12 aa, synthetic construct
PPQPKKKPLDGE

SEQ ID NO: 34402 - protein, 21 aa, synthetic construct
SGGSKRTADGSEFEPKKKRKV

SEQ ID NO: 34403 - protein, 17 aa, synthetic construct
KRTADGSEFEPKKKRKV

SEQ ID NO: 34404 - protein, 2117 aa, synthetic construct
MKRTADGSEFESPKKKRKVDKKYSIGLDIGTNSVGWAVITDEYKVPSKKFKVLGNTDRHSIKKNLIGALLFDSGETAEATRLKRTARRRYTRRKNRICYLQEIFSNEMAKVDDSFFHRLEESFLVEEDKKHERHPIFGNIVDEVAYHEKYPTIYHLRKKLVDSTDKADLRLIYLALAHMIKFRGHFLIEGDLNPDNSDVDKLFIQLVQTYNQLFEENPINASGVDAKAILSARLSKSRRLENLIAQLPGEKKNGLFGNLIALSLGLTPNFKSNFDLAEDAKLQLSKDTYDDDLDNLLAQIGDQYADLFLAAKNLSDAILLSDILRVNTEITKAPLSASMIKRYDEHHQDLTLLKALVRQQLPEKYKEIFFDQSKNGYAGYIDGGASQEEFYKFIKPILEKMDGTEELLVKLNREDLLRKQRTFDNGSIPHQIHLGELHAILRRQEDFYPFLKDNREKIEKILTFRIPYYVGPLARGNSRFAWMTRKSEETITPWNFEEVVDKGASAQSFIERMTNFDKNLPNEKVLPKHSLLYEYFTVYNELTKVKYVTEGMRKPAFLSGEQKKAIVDLLFKTNRKVTVKQLKEDYFKKIECFDSVEISGVEDRFNASLGTYHDLLKIIKDKDFLDNEENEDILEDIVLTLTLFEDREMIEERLKTYAHLFDDKVMKQLKRRRYTGWGRLSRKLINGIRDKQSGKTILDFLKSDGFANRNFMQLIHDDSLTFKEDIQKAQVSGQGDSLHEHIANLAGSPAIKKGILQTVKVVDELVKVMGRHKPENIVIEMARENQTTQKGQKNSRERMKRIEEGIKELGSQILKEHPVENTQLQNEKLYLYYLQNGRDMYVDQELDINRLSDYDVDAIVPQSFLKDDSIDNKVLTRSDKNRGKSDNVPSEEVVKKMKNYWRQLLNAKLITQRKFDNLTKAERGGLSELDKAGFIKRQLVETRQITKHVAQILDSRMNTKYDENDKLIREVKVITLKSKLVSDFRKDFQFYKVREINNYHHAHDAYLNAVVGTALIKKYPKLESEFVYGDYKVYDVRKMIAKSEQEIGKATAKYFFYSNIMNFFKTEITLANGEIRKRPLIETNGETGEIVWDKGRDFATVRKVLSMPQVNIVKKTEVQTGGFSKESILPKRNSDKLIARKKDWDPKKYGGFDSPTVAYSVLVVAKVEKGKSKKLKSVKELLGITIMERSSFEKNPIDFLEAKGYKEVKKDLIIKLPKYSLFELENGRKRMLASAGELQKGNELALPSKYVNFLYLASHYEKLKGSPEDNEQKQLFVEQHKHYLDEIIEQISEFSKRVILADANLDKVLSAYNKHRDKPIREQAENIIHLFTLTNLGAPAAFKYFDTTIDRKRYTSTKEVLDATLIHQSITGLYETRIDLSQLGGDSGGSSGGSSGSETPGTSESATPESSGGSSGGSSTLNIEDEYRLHETSKEPDVSLGSTWLSDFPQAWAETGGMGLAVRQAPLIIPLKATSTPVSIKQYPMSQEARLGIKPHIQRLLDQGILVPCQSPWNTPLLPVKKPGTNDYRPVQDLREVNKRVEDIHPTVPNPYNLLSGLPPSHQWYTVLDLKDAFFCLRLHPTSQPLFAFEWRDPEMGISGQLTWTRLPQGFKNSPTLFNEALHRDLADFRIQHPDLILLQYVDDLLLAATSELDCQQGTRALLQTLGNLGYRASAKKAQICQKQVKYLGYLLKEGQRWLTEARKETVMGQPTPKTPRQLREFLGKAGFCRLFIPGFAEMAAPLYPLTKPGTLFNWGPDQQKAYQEIKQALLTAPALGLPDLTKPFELFVDEKQGYAKGVLTQKLGPWRRPVAYLSKKLDPVAAGWPPCLRMVAAIAVLTKDAGKLTMGQPLVILAPHAVEALVKQPPDRWLSNARMTHYQALLLDTDRVQFGPVVALNPATLLPLPEEGLQHNCLDILAEAHGTRPDLTDQPLPDADHTWYTDGSSLLQEGQRKAGAAVTTETEVIWAKALPAGTSAQRAELIALTQALKMAEGKKLNVYTDSRYAFATAHIHGEIYRRRGWLTSEGKEIKNKDEILALLKALFLPKRLSIIHCPGHQKGHSAEARGNRMADQAARKAAITETPDTSTLLIENSSPSGGSKRTADGSEFEPKKKRKV

SEQ ID NO: 34405 - protein, 2131 aa, synthetic construct
MKRTADGSEFESPKKKRKVDKKYSIGLDIGTNSVGWAVITDEYKVPSKKFKVLGNTDRHSIKKNLIGALLFDSGETAEATRLKRTARRRYTRRKNRICYLQEIFSNEMAKVDDSFFHRLEESFLVEEDKKHERHPIFGNIVDEVAYHEKYPTIYHLRKKLVDSTDKADLRLIYLALAHMIKFRGHFLIEGDLNPDNSDVDKLFIQLVQTYNQLFEENPINASGVDAKAILSARLSKSRKLENLIAQLPGEKKNGLFGNLIALSLGLTPNFKSNFDLAEDAKLQLSKDTYDDDLDNLLAQIGDQYADLFLAAKNLSDAILLSDILRVNTEITKAPLSASMIKRYDEHHQDLTLLKALVRQQLPEKYKEIFFDQSKNGYAGYIDGGASQEEFYKFIKPILEKMDGTEELLVKLKREDLLRKQRTFDNGSIPHQIHLGELHAILRRQEDFYPFLKDNREKIEKILTFRIPYYVGPLARGNSRFAWMTRKSEETITPWNFEEVVDKGASAQSFIERMTNFDKNLPNEKVLPKHSLLYEYFTVYNELTKVKYVTEGMRKPAFLSGEQKKAIVDLLFKTNRKVTVKQLKEDYFKKIECFDSVEISGVEDRFNASLGTYHDLLKIIKDKDFLDNEENEDILEDIVLTLTLFEDREMIEERLKTYAHLFDDKVMKQLKRRRYTGWGRLSRKLINGIRDKQSGKTILDFLKSDGFANRNFMQLIHDDSLTFKEDIQKAQVSGQGDSLHEHIANLAGSPAIKKGILQTVKVVDELVKVMGRHKPENIVIEMARENQTTQKGQKNSRERMKRIEEGIKELGSQILKEHPVENTQLQNEKLYLYYLQNGRDMYVDQELDINRLSDYDVDAIVPQSFLKDDSIDNKVLTRSDKNRGKSDNVPSEEVVKKMKNYWRQLLNAKLITQRKFDNLTKAERGGLSELDKAGFIKRQLVETRQITKHVAQILDSRMNTKYDENDKLIREVKVITLKSKLVSDFRKDFQFYKVREINNYHHAHDAYLNAVVGTALIKKYPKLESEFVYGDYKVYDVRKMIAKSEQEIGKATAKYFFYSNIMNFFKTEITLANGEIRKRPLIETNGETGEIVWDKGRDFATVRKVLSMPQVNIVKKTEVQTGGFSKESILPKRNSDKLIARKKDWDPKKYGGFDSPTVAYSVLVVAKVEKGKSKKLKSVKELLGITIMERSSFEKNPIDFLEAKGYKEVKKDLIIKLPKYSLFELENGRKRMLASAGELQKGNELALPSKYVNFLYLASHYEKLKGSPEDNEQKQLFVEQHKHYLDEIIEQISEFSKRVILADANLDKVLSAYNKHRDKPIREQAENIIHLFTLTNLGAPAAFKYFDTTIDRKRYTSTKEVLDATLIHQSITGLYETRIDLSQLGGDSGGSSGGSKRTADGSEFESPKKKRKVSGGSSGGSTLNIEDEYRLHETSKEPDVSLGSTWLSDFPQAWAETGGMGLAVRQAPLIIPLKATSTPVSIKQYPMSQEARLGIKPHIQRLLDQGILVPCQSPWNTPLLPVKKPGTNDYRPVQDLREVNKRVEDIHPTVPNPYNLLSGLPPSHQWYTVLDLKDAFFCLRLHPTSQPLFAFEWRDPEMGISGQLTWTRLPQGFKNSPTLFNEALHRDLADFRIQHPDLILLQYVDDLLLAATSELDCQQGTRALLQTLGNLGYRASAKKAQICQKQVKYLGYLLKEGQRWLTEARKETVMGQPTPKTPRQLREFLGKAGFCRLFIPGFAEMAAPLYPLTKPGTLFNWGPDQQKAYQEIKQALLTAPALGLPDLTKPFELFVDEKQGYAKGVLTQKLGPWRRPVAYLSKKLDPVAAGWPPCLRMVAAIAVLTKDAGKLTMGQPLVILAPHAVEALVKQPPDRWLSNARMTHYQALLLDTDRVQFGPVVALNPATLLPLPEEGLQHNCLDILAEAHGTRPDLTDQPLPDADHTWYTDGSSLLQEGQRKAGAAVTTETEVIWAKALPAGTSAQRAELIALTQALKMAEGKKLNVYTDSRYAFATAHIHGEIYRRRGWLTSEGKEIKNKDEILALLKALFLPKRLSIIHCPGHQKGHSAEARGNRMADQAARKAAITETPDTSTLLIENSSPSGGSKRTADGSEFESPKKKRKVGSGPAAKRVKLD

SEQ ID NO: 34406 - protein, 1367 aa, synthetic construct
DKKYSIGLDIGTNSVGWAVITDEYKVPSKKFKVLGNTDRHSIKKNLIGALLFDSGETAEATRLKRTARRRYTRRKNRICYLQEIFSNEMAKVDDSFFHRLEESFLVEEDKKHERHPIFGNIVDEVAYHEKYPTIYHLRKKLVDSTDKADLRLIYLALAHMIKFRGHFLIEGDLNPDNSDVDKLFIQLVQTYNQLFEENPINASGVDAKAILSARLSKSRKLENLIAQLPGEKKNGLFGNLIALSLGLTPNFKSNFDLAEDAKLQLSKDTYDDDLDNLLAQIGDQYADLFLAAKNLSDAILLSDILRVNTEITKAPLSASMIKRYDEHHQDLTLLKALVRQQLPEKYKEIFFDQSKNGYAGYIDGGASQEEFYKFIKPILEKMDGTEELLVKLKREDLLRKQRTFDNGSIPHQIHLGELHAILRRQEDFYPFLKDNREKIEKILTFRIPYYVGPLARGNSRFAWMTRKSEETITPWNFEEVVDKGASAQSFIERMTNFDKNLPNEKVLPKHSLLYEYFTVYNELTKVKYVTEGMRKPAFLSGEQKKAIVDLLFKTNRKVTVKQLKEDYFKKIECFDSVEISGVEDRFNASLGTYHDLLKIIKDKDFLDNEENEDILEDIVLTLTLFEDREMIEERLKTYAHLFDDKVMKQLKRRRYTGWGRLSRKLINGIRDKQSGKTILDFLKSDGFANRNFMQLIHDDSLTFKEDIQKAQVSGQGDSLHEHIANLAGSPAIKKGILQTVKVVDELVKVMGRHKPENIVIEMARENQTTQKGQKNSRERMKRIEEGIKELGSQILKEHPVENTQLQNEKLYLYYLQNGRDMYVDQELDINRLSDYDVDAIVPQSFLKDDSIDNKVLTRSDKNRGKSDNVPSEEVVKKMKNYWRQLLNAKLITQRKFDNLTKAERGGLSELDKAGFIKRQLVETRQITKHVAQILDSRMNTKYDENDKLIREVKVITLKSKLVSDFRKDFQFYKVREINNYHHAHDAYLNAVVGTALIKKYPKLESEFVYGDYKVYDVRKMIAKSEQEIGKATAKYFFYSNIMNFFKTEITLANGEIRKRPLIETNGETGEIVWDKGRDFATVRKVLSMPQVNIVKKTEVQTGGFSKESILPKRNSDKLIARKKDWDPKKYGGFDSPTVAYSVLVVAKVEKGKSKKLKSVKELLGITIMERSSFEKNPIDFLEAKGYKEVKKDLIIKLPKYSLFELENGRKRMLASAGELQKGNELALPSKYVNFLYLASHYEKLKGSPEDNEQKQLFVEQHKHYLDEIIEQISEFSKRVILADANLDKVLSAYNKHRDKPIREQAENIIHLFTLTNLGAPAAFKYFDTTIDRKRYTSTKEVLDATLIHQSITGLYETRIDLSQLGGD

SEQ ID NO: 34407 - protein, 34 aa, synthetic construct
SGGSSGGSKRTADGSEFESPKKKRKVSGGSSGGS

SEQ ID NO: 34408 - protein, 22 aa, synthetic construct
SGGSKRTADGSEFESPKKKRKV

SEQ ID NO: 34409 - protein, 12 aa, synthetic construct
GSGPAAKRVKLD

SEQ ID NO: 34410 - protein, 150 aa, synthetic construct
  SITE 1..150: note = This sequence may encompass 1-30 GGGGS repeats
GGGGSGGGGSGGGGSGGGGSGGGGSGGGGSGGGGSGGGGSGGGGSGGGGSGGGGSGGGGSGGGGSGGGGSGGGGSGGGGSGGGGSGGGGSGGGGSGGGGSGGGGSGGGGSGGGGSGGGGSGGGGSGGGGSGGGGSGGGGSGGGGSGGGGS

SEQ ID NO: 34411 - protein, 30 aa, synthetic construct
  SITE 1..30: note = This sequence may encompass 1-30 Gly residues
GGGGGGGGGGGGGGGGGGGGGGGGGGGGGG

SEQ ID NO: 34412 - protein, 150 aa, synthetic construct
  SITE 1..150: note = This sequence may encompass 1-30 EAAAK repeats
EAAAKEAAAKEAAAKEAAAKEAAAKEAAAKEAAAKEAAAKEAAAKEAAAKEAAAKEAAAKEAAAKEAAAKEAAAKEAAAKEAAAKEAAAKEAAAKEAAAKEAAAKEAAAKEAAAKEAAAKEAAAKEAAAKEAAAKEAAAKEAAAKEAAAK

SEQ ID NO: 34413 - protein, 90 aa, synthetic construct
  SITE 1..90: note = This sequence may encompass 1-30 GGS repeats
GGSGGSGGSGGSGGSGGSGGSGGSGGSGGSGGSGGSGGSGGSGGSGGSGGSGGSGGSGGSGGSGGSGGSGGSGGSGGSGGSGGSGGSGGS

SEQ ID NO: 34414 - protein, 120 aa, synthetic construct
  SITE 1..120: note = This sequence may encompass 1-30 SGGS repeats
SGGSSGGSSGGSSGGSSGGSSGGSSGGSSGGSSGGSSGGSSGGSSGGSSGGSSGGSSGGSSGGSSGGSSGGSSGGSSGGSSGGSSGGSSGGSSGGSSGGSSGGSSGGSSGGSSGGSSGGS

SEQ ID NO: 34415 - protein, 60 aa, synthetic construct
  SITE 1..60: note = This sequence may encompass 1-30 XP repeats
XPXPXPXPXPXPXPXPXPXPXPXPXPXPXPXPXPXPXPXPXPXPXPXPXPXPXPXPXPXP

SEQ ID NO: 34416 - protein, 16 aa, synthetic construct
SGSETPGTSESATPES

SEQ ID NO: 34417 - protein, 32 aa, synthetic construct
SGGSSGGSSGSETPGTSESATPESSGGSSGGS

SEQ ID NO: 34418 - protein, 33 aa, synthetic construct
SGGSSGGSSGSETPGTSESATPESSGGSSGGSS

SEQ ID NO: 34419 - protein, 10 aa, synthetic construct
SGGSGGSGGS

SEQ ID NO: 34420 - protein, 4 aa, synthetic construct
SGGS

SEQ ID NO: 34421 - protein, 60 aa, synthetic construct
SGGSSGGSSGSETPGTSESATPESAGSYPYDVPDYAGSAAPAAKKKKLDGSGSGGSSGGS

SEQ ID NO: 34422 - protein, 390 aa, Homo sapiens
MGDTFIRHIALLGFEKRFVPSQHYVYMFLVKWQDLSEKVVYRRFTEIYEFHKTLKEMFPIEAGAINPENRIIPHLPAPKWFDGQRAAENRQGTLTEYCSTLMSLPTKISRCPHLLDFFKVRPDDLKLPTDNQTKKPETYLMPKDGKSTATDITGPIILQTYRAIANYEKTSGSEMALSTGDVVEVVEKSESGWWFCQMKAKRGWIPASFLEPLDSPDETEDPEPNYAGEPYVAIKAYTAVEGDEVSLLEGEAVEVIHKLLDGWWVIRKDDVTGYFPSMYLQKSGQDVSQAQRQIKRGAPPRRSSIRNAHSIHQRSRKRLSQDAYRRNSVRFLQQRRRQARPGPQSPGSPLEEERQTQRSKPQPAVPPRPSADLILNRCSESTKRKLASAV

SEQ ID NO: 34423 - DNA, 15 bp, synthetic construct
  source 1..15: mol_type = other DNA
tgtccctgctcgagg

SEQ ID NO: 34424 - RNA, 76 nt, synthetic construct
  source 1..76: mol_type = other RNA
gttttagagctagaaatagcaagttaaaataaggctagtccgttatcaacttgaaaaagtggcaccgagtcggtgc

SEQ ID NO: 34425 - RNA, 76 nt, synthetic construct
  source 1..76: mol_type = other RNA
gtttgagagctagaaatagcaagtttaaataaggctagtccgttatcaacttgaaaaagtgggaccgagtcggtcc

SEQ ID NO: 34426 - RNA, 86 nt, synthetic construct
  source 1..86: mol_type = other RNA
gtttaagagctatgctggaaacagcatagcaagtttaaataaggctagtccgttatcaacttgaaaaagtggcaccgagtcggtgc

SEQ ID NO: 34427 - RNA, 76 nt, synthetic construct
  source 1..76: mol_type = other RNA
gttttagtactctggaaacagaatctactaaaacaaggcaaaatgccgtgtttatctcgtcaacttgttggcgaga

SEQ ID NO: 34428 - RNA, 76 nt, synthetic construct
  source 1..76: mol_type = other RNA
gttttagtactctggaaacagaatctactgaaacaagacaatatgtcgtgtttatcccatcaatttattggtggga
